(19) United States
(12) Patent Application Publication
(10) Pub. No.: US 2024/0041038 A1
(43) Pub. Date: Feb. 8, 2024

(54) INSECTICIDAL COMBINATIONS

(71) Applicant: Vestaron Corporation, Kalamazoo, MI (US)

(72) Inventors: Kyle SCHNEIDER, Kalamazoo, MI (US); Breck DAVIS, Kalamazoo, MI (US); Daniel HULBERT, Kalamazoo, MI (US); Joseph TOURTOIS, Kalamazoo, MI (US)

(73) Assignee: Vestaron Corporation, Kalamazoo, MI (US)

(21) Appl. No.: 17/922,469

(22) PCT Filed: Apr. 30, 2021
(86) PCT No.: PCT/US2021/030277

§ 371 Date: Oct. 31, 2022

Related U.S. Application Data
(60) Provisional application No. 63/019,219, filed on May 1, 2020.

(51) Int. Cl. A01N 37/46; A01N 59/14; A01N 63/23; A01N 63/40; A01P 7/04; A01N 65/26; A01N 63/30; A01N 63/12

(52) U.S. Cl. CPC A01N 37/46; A01N 59/14; A01N 63/23; A01N 63/40; A01P 7/04; A01N 65/26; A01N 63/30; A01N 63/12

(57) ABSTRACT

New insecticidal combinations, compositions, and methods of using the same are provided. The present invention is directed to combinations of Cysteine Rich Insecticidal Peptides (CRIPS), and Insecticidal Agents (IAs). The present invention also describes the use of said combinations and compositions for the control of insects. Here, we describe the following: genes encoding CRIPs; compositions and combinations comprising CRIPs and IAs; and methods using the same that are useful for the control of pests.

### CROSS REFERENCE TO RELATED APPLICATIONS

[0001] This application claims the benefit of, and priority to, U.S. Provisional Application Ser. No. 63/019,219 filed on May 1, 2020, the disclosure of which is incorporated by reference herein in its entirety.

### SEQUENCE LISTING

[0002] This application incorporates by reference in its entirety the Sequence Listing entitled “225312-491452 ST25.txt” (1.41 MB), which was created on Apr. 28, 2021 at 10:07 PM, and filed electronically herewith.

### TECHNICAL FIELD

[0003] New insecticidal combinations of Cysteine Rich Insecticidal Proteins (CRIPs), and Insecticidal Agents (IAs), e.g., chemical substances, molecules, nucleotides, polynucleotides, peptides, polypeptides, proteins, toxins, toxicants, poisons, insecticides, pesticides, organic compounds, inorganic compounds, prokaryote organisms, or eukaryote organisms (and the agents produced from said prokaryote or eukaryote organisms), for the control and/or eradication of pests are described and claimed.

### BACKGROUND

[0004] Numerous insects are vectors for disease. Mosquitoes in the genus Anopheles are the principle vectors of Zika virus, Chikungunya virus, and malaria, a disease caused by protozoa in the genus Trypanosoma. Aedes aegypti is the main vector of the viruses that cause Yellow fever and Dengue. Other viruses, the causal agents of various types of encephalitis, are also carried by Aedes spp. mosquitoes. Wuchereria bancrofti and Brugia malayi, parasitic roundworms that cause filariasis, are usually spread by mosquitoes in the genera Culex, Mansonia, and Anopheles.

[0005] Horse flies and deer flies may transmit the bacterial pathogens of tularemia (Pasteurella tularensis) and anthrax (Bacillus anthracis), as well as a parasitic roundworm (Loa loa) that causes loiasis in tropical Africa.

[0006] Eye gnats in the genus Hippelates can carry the spirochaete pathogen that causes yaws (Treponema pertenue), and may also spread conjunctivitis (pinkeye). Tsetse flies in the genus Glossina transmit the protozoan pathogens that cause African sleeping sickness (Trypanosoma gambiense and T. rhodesiense). Sand flies in the genus Phlebotomus are vectors of a bacterium (Bartonella bacilliformis) that causes Carrion's disease (Oroyo fever) in South America. In parts of Asia and North Africa, they spread a viral agent that causes sand fly fever (Pappataci fever) as well as protozoan pathogens (Leishmania spp.) that cause Leishmaniasis.

[0007] Accordingly, in order to preserve the crops we depend on for food, and safeguard human and animal health, effective insecticidal treatments are needed.

[0008] Here we describe combinations of Insecticidal Agents (IAs) and Cysteine-Rich Insecticidal Peptides (CRIPs). IAs are one or more chemical substances, molecules, nucleotides, polynucleotides, peptides, polypeptides, proteins, toxins, toxicants, poisons, insecticides, pesticides, organic compounds, inorganic compounds, prokaryote organisms and/or the products therefrom (such as bacterial toxins), or eukaryote organisms and/or the products therefrom (such as fungal toxins). IAs can be combined to provide insecticidal effects that are greater than the additive effect of any IA used in isolation.

[0009] CRIPs are peptides, polypeptides, and/or proteins that possess cysteine residues that, in some embodiments, are capable of forming disulfide bonds; these disulfide bonds create a scaffolding motif that is observed in a wide variety of unrelated protein families. An example of peptides that fall within the CRIP family are inhibitor cystine knot (ICK) peptides. ICK peptides include many molecules that have insecticidal activity. Such ICK peptides are often toxic to naturally occurring biological target species, usually insects or arachnids of some type. Often ICK peptides can have arthropod origins such as the venoms of scorpions or spiders.

[0010] Here, we describe novel insecticidal combinations of IAs and CRIPs. For example, we describe, inter alia, an insecticidally effective combinations comprising (1) one or more CRIPs, or pharmaceutically acceptable salts thereof; one or more CRIP-insecticidal proteins, or pharmaceutically acceptable salts thereof; or a combination thereof; and (2) one or more Insecticidal Agents (IA), and methods of using the same to preserve the crops we depend on for food, and safeguard human and animal health.

### SUMMARY

[0011] This invention describes how to combine CRIPs and IAs so they provide insecticidal effects that are greater than the additive insecticidal effect of any IA or CRIP used in isolation. The present disclosure describes how to make and use combinations of CRIPS and IAs to kill and control insects, even insecticide-resistant insects, and even at low doses. Without being bound by theory, our understanding of CRIPs and IAs allows us to teach one ordinarily skilled in the art, to create novel methods, compositions, compounds (proteins and peptides) and procedures to protect plants and control insects.

[0012] The present disclosure describes a combination comprising a Cysteine Rich Insecticidal Peptide (CRIP) and an Insecticidal Agent (IA).

[0013] In addition, the present disclosure describes a combination comprising a Cysteine Rich Insecticidal Peptide (CRIP) and an Insecticidal Agent (IA), wherein the IA is a bacterial toxin; a fungal toxin; a lectin; an Azadirachta indica compound; a boron compound; a virus; or a combination thereof; and wherein the CRIP is a U1-agatoxin-Ta1b peptide; a U1-agatoxin-Ta1b Variant Polypeptide (TVP); a sea anemone toxin; an Av3 Variant Polypeptide (AVP); a Phoneutria toxin; or an Atracotoxin (ACTX).

[0014] In addition, the present disclosure describes a composition comprising the combination a combination comprising a Cysteine Rich Insecticidal Peptide (CRIP) and an Insecticidal Agent (IA), and further comprising an excipient.

[0015] In addition, the present disclosure describes a combination comprising one or more fermentation solids, spores, or toxins isolated from a Bacillus thuringiensis ssp. kurstaki strain EVB-113-19, and a U1-agatoxin-Ta1b peptide having an amino acid sequence according to the amino acid sequence set forth in SEQ ID NO: 1.

[0016] In addition, the present disclosure describes a combination comprising one or more fermentation solids, spores, or toxins isolated from a Bacillus thuringiensis ssp. kurstaki strain EVB-113-19, and a U1-agatoxin-Ta1b Variant Polypeptide (TVP) having an amino acid sequence according to the amino acid sequence set forth in SEQ ID NO: 2.

[0017] In addition, the present disclosure describes a combination comprising one or more fermentation solids, spores, or toxins isolated from a Bacillus thuringiensis ssp. kurstaki strain EVB-113-19, and an Av3-Variant Polypeptide (AVP) having an amino acid sequence according to the amino acid sequence set forth in SEQ ID NO: 67.

[0018] In addition, the present disclosure describes a combination comprising one or more fermentation solids, spores, or toxins isolated from a Bacillus thuringiensis ssp. kurstaki strain EVB-113-19, and a Γ-CNTX-Pn1a toxin having an amino acid sequence according to the amino acid sequence set forth in SEQ ID NO: 65.

[0019] In addition, the present disclosure describes a combination comprising a Beauveria bassiana strain ANT-03 spore, and a U+2-ACTX-Hv1a toxin having an amino acid sequence according to the amino acid sequence set forth in SEQ ID NO: 61.

[0020] In addition, the present disclosure describes a combination comprising one or more fermentation solids, spores, or toxins isolated from a Bacillus thuringiensis ssp. tenebrionis strain NB-176, and a U+2-ACTX-Hv1a toxin having an amino acid sequence according to the amino acid sequence set forth in SEQ ID NO: 61.

[0021] In addition, the present disclosure describes a combination comprising one or more fermentation solids, spores, or toxins isolated from a Bacillus thuringiensis ssp. kurstaki strain EVB-113-19, and a U+2-ACTX-Hv1a toxin having an amino acid sequence according to the amino acid sequence set forth in SEQ ID NO: 61.

[0022] In addition, the present disclosure describes a combination comprising one or more fermentation solids, spores, or toxins isolated from a Bacillus thuringiensis ssp. israelensis Strain BMP 144, and a U+2-ACTX-Hv1a toxin having an amino acid sequence according to the amino acid sequence set forth in SEQ ID NO: 61.

[0023] In addition, the present disclosure describes a combination comprising a Photorhabdus luminescens toxin, and an ACTX; wherein the Photorhabdus luminescens toxin is a Photorhabdus luminescens toxin complex (Tca) comprising a TcaA (SEQ ID NO: 616), a TcaB (SEQ ID NO: 617), a TcaC (SEQ ID NO: 618), and a TcaZ (SEQ ID NO: 619); and wherein the ACTX peptide is a U+2-ACTX-Hv1a toxin (SEQ ID NO: 61).

[0024] In addition, the present disclosure describes a combination comprising a Galanthus nivalis agglutinin (GNA), and an ACTX; wherein the GNA has an amino acid sequence as set forth in SEQ ID NO: 35; and wherein the ACTX peptide is a U+2-ACTX-Hv1a toxin having an amino acid sequence according to the amino acid sequence set forth in SEQ ID NO: 61.

[0025] In addition, the present disclosure describes a combination comprising an Azadirachtin, and an ACTX; wherein the Azadirachtin is an Azadirachtin having a chemical formula: C₃₅H₄₄O₁₆; and wherein the ACTX is a U+2-ACTX-Hv1a toxin having an amino acid sequence according to the amino acid sequence set forth in SEQ ID NO: 61.

[0026] In addition, the present disclosure describes a combination comprising a boric acid compound, and an ACTX; wherein the boric acid compound has a chemical formula of H₃BO₃; and wherein the ACTX peptide is a U+2-ACTX-Hv1a toxin having an amino acid sequence according to the amino acid sequence set forth in SEQ ID NO: 61.

[0027] In addition, the present disclosure describes a combination comprising a Cydia pomonella granulovirus (CpGV), and an ACTX; wherein the CpGV is a Cydia pomonella granulovirus isolate V22 virus; and wherein the ACTX peptide is a U+2-ACTX-Hv1a toxin having an amino acid sequence according to the amino acid sequence set forth in SEQ ID NO: 61.

[0028] In addition, the present disclosure describes a method of using a combination comprising a Cysteine Rich Insecticidal Peptide (CRIP) and an Insecticidal Agent (IA) to control insects, said method comprising, providing a combination of at least one CRIP and at least one IA, applying a combination comprising a Cysteine Rich Insecticidal Peptide (CRIP) and an Insecticidal Agent (IA) to the locus of an insect.

[0029] In addition, the present disclosure describes a method of using a combination comprising a Cysteine Rich Insecticidal Peptide (CRIP) and an Insecticidal Agent (IA) to control Bacillus thuringiensis-toxin-resistant insects comprising, providing a combination of at least one CRIP and at least on IA; and then applying said combination to the locus of an insect.

[0030] In addition, the present disclosure describes a method of combating, controlling, or inhibiting a pest comprising, applying a pesticidally effective amount of a combination comprising a Cysteine Rich Insecticidal Peptide (CRIP) and an Insecticidal Agent (IA) to the locus of the pest, or to a plant or animal susceptible to an attack by the pest.

### BRIEF DESCRIPTION OF THE DRAWINGS

[0031] FIG. 1 shows a graph depicting the 24-hour mortality of Aedes aegypti (mosquito) larvae after a diet incorporation assay using (1) U+2-ACTX-Hv1a with Bti; (2) Bti toxin alone; (3) U+2-ACTX-Hv1a alone; and (4) control (water).

[0032] FIG. 2 depicts a graph showing the 3-day mortality of the Lepidopteran species, the beet armyworm (Spodoptera exigua) after a foliar spray assay with Bacillus thuringiensis var. kurstaki toxins (Btk) combined with Γ-CNTX-Pn1a. Here, the treatments were (1) Γ-CNTX-Pn1a alone; (2) Btk toxin alone; (3) a combination of Γ-CNTX-Pn1a and Btk toxin; or (4) a control (0.125% Vintre, a surfactant).

[0033] FIG. 3 depicts a graph showing the 3-day mortality of the Lepidopteran species, the beet armyworm (Spodoptera exigua), after a foliar spray assay with Btk combined with Av3-Variant Polypeptides (AVPs). Here, (1) AVP alone; (2) Btk toxin alone; (3) a combination of both AVP and Btk toxin; or (4) a control (0.125% Vintre, a surfactant) were tested. The AVP tested here was AVPb.

[0034] FIG. 4 shows a chromatogram evaluating WT-Ta1b degradation in Helicoverpa zea gut extract (HGE), a simulated lepidopteran gut environment, after 0, 20, 40, 60, 180, and 1260 minutes. The box indicates the major and minor peaks, thus indicating the degradation of WT-Ta1b. Nested insets show zoomed in and zoomed out views of the chromatogram. The box highlights the peaks demonstrating the proteolysis event, which is evidenced by the presence of two shoulders: the smaller “shoulder” on the right side of the main peak indicates the partial proteolyzation event.

[0035] FIG. 5 shows a chromatogram evaluating TVP-R9Q degradation in Helicoverpa zea gut extract (HGE), a simulated lepidopteran gut environment, after 0, 20, 40, 60, 180, and 1260 minutes. The box indicates the presence of single peak, thus indicating the stability of TVP-R9Q. Nested insets show zoomed in and zoomed out views of the chromatogram. Here, the presence of a single main peak (shown in the box) indicates the stability of the TVP-R9Q peptide.

[0036] FIG. 6 depicts a graph showing the results of a defoliation assay when testing WT-Ta1b, Btk toxins, and combinations thereof against the Lepidopteran species, Helicoverpa zea (corn earworm). Treatments were as follows: (1) WT-Ta1b alone; (2) Btk toxin alone; (3) a combination of both WT-Ta1b and Btk toxin; or (4) a control (0.125% Vintre, a surfactant). Here, Btk toxins are shown as “Btk”

[0037] FIG. 7 depicts a graph showing the results of a defoliation assay when testing TVP-R9Q, Btk toxins, and combinations thereof against the Lepidopteran species, Helicoverpa zea (corn earworm). Treatments were as follows: (1) TVP-R9Q alone; (2) Btk toxin alone; (3) a combination of both TVP-R9Q and Btk toxin; or (4) a control (0.125% Vintre, a surfactant). Here, Btk toxins are shown as “Btk”

[0038] FIG. 8 depicts a graph showing the results of a mortality assay when testing WT-Ta1b, Btk toxins, and combinations thereof against the Lepidopteran species, Helicoverpa zea (corn earworm). Treatments were as follows: (1) WT-Ta1b alone; (2) Btk toxin alone; (3) a combination of both WT-Ta1b and Btk toxin; or (4) a control (0.125% Vintre, a surfactant). Here, Btk toxins are shown as “Btk”

[0039] FIG. 9 depicts a graph showing the results of a mortality assay when testing TVP-R9Q, Btk toxins, and combinations thereof against the Lepidopteran species, Helicoverpa zea (corn earworm). Treatments were as follows: (1) TVP-R9Q alone; (2) Btk toxin alone; (3) a combination of both TVP-R9Q and Btk toxin; or (4) a control (0.125% Vintre, a surfactant). Here, Btk toxins are shown as “Btk”

[0040] FIG. 10 depicts a graph showing the 4-day mortality of the Coleopteran species, the Darkling Beetle (Alphilobius diaperinus) after a diet incorporation assay with (1) U+2-ACTX-Hv1a alone; (2) Btt toxin alone; (3) a combination of both U+2-ACTX-Hv1a and Btt toxin; or (4) an untreated control (water).

[0041] FIG. 11 depicts a graph showing the 4-day mortality of the Colorado potato beetle (Leptinotarsa decemlineata) when sprayed with (1) U+2-ACTX-Hv1a alone; (2) Btt toxin alone; (3) a combination of both U+2-ACTX-Hv1a and Btt toxin; or (4) an untreated control (water).

[0042] FIG. 12 depicts a graph showing mortality at day 4 in corn earworm larvae treated with: (a) Water; (b) Photorhabdus luminescens toxin complex extract alone (4.75% v/v); (c) 10 mg/mL U+2-ACTX-Hv1a (1% w/v); and (d) Photorhabdus luminescens toxin complex extract (4.75% w/v) with 10 mg/mL U+2-ACTX-Hv1a (1% w/v). Here, % w/v is percent w/v of the total volume of the composition, with the remainder being water.

[0043] FIG. 13 depicts a graph showing the mortality rate in corn earworm neonates on day three after being treated with (a) 0 mg/mL GNA (0% w/v); with 0 mg/mL U+2-ACTX-Hv1a (0% w/v) (control); (b) 2.5 mg/mL GNA (0.25% w/v); 0 mg/mL U+2-ACTX-Hv1a (0% w/v); (c) 0 mg/mL GNA (0% w/v); 5 mg/mL U+2-ACTX-Hv1a (0.5% w/v); and (d) 2.5 mg/mL GNA (0.25% w/v); 5 mg/mL U+2-ACTX-Hv1a (0.5% w/v). Here, % w/v is percent w/v of the total volume of the composition, with the remainder being water. Proportional mortality refers to the proportion of individual insects killed over the course of an experiment, i.e., the number of dead individuals over the total number of individuals.

[0044] FIG. 14 depicts a graph showing the mortality rate in Fall armyworm (Spodoptera frugiperda) larvae on day three after being treated with (a) Chitinase 0 μL/L (0% w/v); U+2-ACTX-Hv1a 0 mg/mL (0% w/v); Sucrose (10% w/v); (b) Chitinase 100 μL/L (0.01% w/v); U+2-ACTX-Hv1a 0 mg/mL (0% w/v); Sucrose (10% w/v); (c) Chitinase μL/L (0% w/v); U+2-ACTX-Hv1a 5 mg/mL (0.5% w/v); Sucrose (10% w/v); and (d) Chitinase 100 μL/L (0.01% w/v); U+2-ACTX-Hv1a 5 mg/mL (0.5% w/v); Sucrose (10% w/v). Here, % w/v is percent w/v of the total volume of the composition, with the remainder being water.

[0045] FIG. 15 depicts the chemical structure of the insect growth regulator, Azadirachtin.

[0046] FIG. 16 depicts a graph showing the mortality rate in Corn earworm (Helicoverpa zea) neonates on day three after being treated with (a) 0 Azadirachtin (0% v/v); 0 mg/mL U+2-ACTX-Hv1a (0% w/v) (control); (b) 80 μL/L Azadirachtin (0.008% v/v); 0 mg/mL U+2-ACTX-Hv1a (0% w/v); (c) 0 μL/L Azadirachtin (0% v/v); 10 mg/mL U+2-ACTX-Hv1a (1% w/v); and (d) 80 μL/L Azadirachtin (0.008% v/v); 10 mg/mL of U+2-ACTX-Hv1a (1% w/v). Here, % w/v is percent w/v of the total volume of the composition, with the remainder being water.

[0047] FIG. 17 depicts a graph showing the mortality rate in Lesser mealworm (Alphitobius diaperinus) neonates on day three after being treated with the following: (a) 0 mg/mL U+2-ACTX-Hv1a (0% w/v); 0 mg/mL boric acid (0% w/v) (control); (b) 0 mg/mL U+2-ACTX-Hv1a (0% w/v); 2.5 mg/mL boric acid (0.25% w/v); (c) 1 mg/mL U+2-ACTX-Hv1a (0.1% w/v); 0 mg/mL boric acid (0% w/v); and (d) 1 mg/mL U+2-ACTX-Hv1a (0.1% w/v); 2.5 mg/mL boric acid (0.25% w/v). Here, % w/v is percent w/v of the total volume of the composition, with the remainder being water.

[0048] FIG. 18 depicts a graph showing the mortality rate in Codling Moths (Cydia pomonella) neonates on day seven after being treated with the following: (a) 0 mg/mL Beauveria bassiana toxins (0% w/v); 0 mg/mL of U+2-ACTX-Hv1a (0% w/v) (control); (b) 1.2 mg/mL Beauveria bassiana toxins (0.12% w/v); 0 mg/mL of U+2-ACTX-Hv1a (0% w/v); (c) 0 mg/mL Beauveria bassiana toxins; 2 mg/mL of U+2-ACTX-Hv1a (0.2% w/v); and (d) 1.2 mg/mL Beauveria bassiana toxins (0.12% w/v); 2 mg/mL of U+2-ACTX-Hv1a (0.2% w/v). Here, % w/v is percent w/v of the total volume of the composition, with the remainder being water.

[0049] FIG. 19 depicts a graph showing the mortality rate in Codling Moths (Cydia pomonella) neonates on day two after being treated with (a) 0 μL/L of CpGV (0% w/v); 0 mg/mL of U+2-ACTX-Hv1a (0% w/v) (control); (b) 58.5 μL/L of CpGV (0.00585% w/v); 0 mg/mL of U+2-ACTX-Hv1a (0% w/v); (c) 0 μL/L of CpGV (0% w/v); 2 mg/mL of U+2-ACTX-Hv1a (0.2% w/v); and (d) 58.5 μL/L of CpGV (0.00585% w/v); 2 mg/mL of U+2-ACTX-Hv1a (0.2% w/v Here, % w/v is percent w/v of the total volume of the composition, with the remainder being water.

[0050] FIG. 20 depicts a graphs showing the results of a diet incorporation assay of Novaluron with U+2-ACTX-Hv1a, and evaluating mortality in corn earworm (Helicoverpa zea) after 3-days. As shown here, there was no evidence of a greater than additive effect when combining Novaluron with U+2-ACTX-Hv1a in a corn earworm (Helicoverpa zea) diet incorporation assay. Here, “U+2” refers to U+2-ACTX-Hv1a. Concentrations of Novaluron were as follows: (a) 80 μL/L, of Novaluron (0.008% w/v); (b) 8 μL/L of Novaluron (0.0008% w/v); (c) 0.8 μL/L, of Novaluron (0.00008% w/v); and (d) 0 μL/L, of Novaluron (0% w/v). 10 ppt of Spear corresponds to 1 mg/mL (1% w/v) of U+2-ACTX-Hv1a.

[0051] FIG. 21 depicts a graphs showing the results of a diet incorporation assay of nanoparticles and U+2-ACTX-Hv1a, and evaluating mortality in corn earworm (Helicoverpa zea) after 3-days. As shown here, there was no evidence of a greater than additive effect when combining nanoparticles with U+2-ACTX-Hv1a in a corn earworm (Helicoverpa zea) diet incorporation assay. Here, “Spear” refers to U+2-ACTX-Hv1a. Concentrations of nanoparticles were as follows: (a) 50 nm silica aminated (2700 ppm); (b) 50 silica (2575 ppm); (c) 20 nm silica (1177 ppm); and (d) 10 nm silica (12500 ppm). Here, “U+2” corresponds to 5 ppt of, U+2-ACTX-Hv1a, i.e., 0.5 mg/mL (0.5% w/v of the total volume of the composition) of U+2-ACTX-Hula. Proportional mortality=the number of dead insects divided by the total number of insects. “UTC” means untreated control (water).

[0052] FIG. 22 depicts a graph showing the mortality dose response of a diet incorporation assay of cryolite and U+2-ACTX-Hv1a against corn earworm (Helicoverpa zea) after 3 days. As shown here, there was no evidence of a greater than additive effect when combining cryolite with U+2-ACTX-Hv1a in a corn earworm (Helicoverpa zea) diet incorporation assay. Here, “U+2” refers to U+2-ACTX-Hv1a. Concentrations of nanoparticles were as follows: (a) 10000 ppm; (b) 2000 ppm; (c) 400 ppm; and (d) 0 ppm. Here, 10 ppt of “U+2” (i.e., U+2-ACTX-Hv1a) corresponds to 1 mg/mL (1% w/v of the total volume of the composition) of U+2-ACTX-Hv1a. Proportional mortality=the number of dead insects divided by the total number of insects.

### DETAILED DESCRIPTION

### Definitions

[0053] “5′-end” and “3′-end” refers to the directionality, i.e., the end-to-end orientation of a nucleotide polymer (e.g., DNA). The 5′-end of a polynucleotide is the end of the polynucleotide that has the fifth carbon.

[0054] “5′- and 3′-homology arms” or “5′ and 3′ arms” or “left and right arms” refers to the polynucleotide sequences in a vector and/or targeting vector that homologously recombine with the target genome sequence and/or endogenous gene of interest in the host organism in order to achieve successful genetic modification of the host organism's chromosomal locus.

[0055] “Γ-CNTX-Pn1a” or “γ-CNTX-Pn1a” or “gamma-CNTX-Pn1a” or “gamma” refers to an insecticidal neurotoxin derived from the Brazilian armed spider, Phoneutria nigriventer. Γ-CNTX-Pn1a targets the N-methyl-D-aspartate (NMDA)-subtype of ionotropic glutamate receptor (GRIN), and sodium channels.

[0056] “ω/κ-HXTX-Hv1a” or “omega/kappa-HXTX-Hv1a,” refers to the insecticidal toxin derived from the Australian Blue Mountain Funnel-web Spider, Hadronyche versuta. ω/κ-HXTX-Hv1a is a type of ACTX peptide, i.e., a family of insecticidal ICK peptides that have been isolated from spiders belonging to the Atracinae family. ω/κ-HXTX-Hv1a is a positive allosteric modulators of the nicotinic acetylcholine receptor, and may also be a dual antagonist to insect voltage-gated Ca²⁺ channels and voltage-gated K⁺ channels. See Chambers et al., Insecticidal spider toxins are high affinity positive allosteric modulators of the nicotinic acetylcholine receptor. FEBS Lett. 2019 June; 593(12):1336-1350; and Windley et al., Lethal effects of an insecticidal spider venom peptide involve positive allosteric modulation of insect nicotinic acetylcholine receptors. Neuropharmacology. 2017 December; 127:224-242, the disclosures of which are incorporated herein by reference in their entireties.

[0057] “ACTX” or “ACTX peptide” or “atracotoxin” refers to a family of insecticidal ICK peptides that have been isolated from spiders belonging to the Atracinae family. One such spider is known as the Australian Blue Mountains Funnel-web Spider, which has the scientific name Hadronyche versuta. Two examples of ACTX peptides from this species are the Omega and U peptides.

[0058] “ADN1 promoter” refers to the DNA segment comprised of the promoter sequence derived from the Schizosaccharomyces pombe adhesion defective protein 1 gene.

[0059] “Alpha-MF signal” or “αMF secretion signal” refers to a protein that directs nascent recombinant polypeptides to the secretory pathway.

[0060] “Agriculturally-acceptable carrier” covers all adjuvants, inert components, dispersants, surfactants, tackifiers, binders, etc. that are ordinarily used in pesticide formulation technology; these are well known to those skilled in pesticide formulation.

[0061] “Agriculturally acceptable salt” is used herein synonymously with the term “pharmaceutically acceptable salt.”

[0062] “Agroinfection” means a plant transformation method where DNA is introduced into a plant cell by using Agrobacteria tumefaciens or Agrobacteria rhizogenes.

[0063] “Alignment” refers to a method of comparing two or more sequences (e.g., nucleotide, polynucleotide, amino acid, peptide, polypeptide, or protein sequences) for the purpose of determining their relationship to each other. Alignments are typically performed by computer programs that apply various algorithms, however, it is also possible to perform an alignment by hand. Alignment programs typically iterate through potential alignments of sequences and score the alignments using substitution tables, employing a variety of strategies to reach a potential optimal alignment score. Commonly-used alignment algorithms include, but are not limited to, CLUSTALW (see Thompson J. D., Higgins D. G., Gibson T. J., CLUSTAL W: improving the sensitivity of progressive multiple sequence alignment through sequence weighting, position-specific gap penalties and weight matrix choice, Nucleic Acids Research 22: 4673-4680, 1994); CLUSTALV (see Larkin M. A., et al., CLUSTALW2, ClustalW and ClustalX version 2, Bioinformatics 23(21): 2947-2948, 2007); Mafft; Kalign; ProbCons; and T-Coffee (see Notredame et al., T-Coffee: A novel method for multiple sequence alignments, Journal of Molecular Biology 302: 205-217, 2000). Exemplary programs that implement one or more of the foregoing algorithms include, but are not limited to, MegAlign from DNAStar (DNAStar, Inc. 3801 Regent St. Madison, Wis. 53705), MUSCLE, T-Coffee, CLUSTALX, CLUSTALV, JalView, Phylip, and Discovery Studio from Accelrys (Accelrys, Inc., 10188 Telesis Ct, Suite 100, San Diego, Calif. 92121). In some embodiments, an alignment will introduce “phase shifts” and/or “gaps” into one or both of the sequences being compared in order to maximize the similarity between the two sequences, and scoring refers to the process of quantitatively expressing the relatedness of the aligned sequences.

[0064] “Alpha-MF signal” or “αMF secretion signal” refers to a protein that directs nascent recombinant polypeptides to the secretory pathway.

[0065] “Arachnid” refers to a class of arthropods. For example in some embodiments, arachnid can mean spiders, scorpions, ticks, mites, harvestmen, or solifuges.

[0066] “Av2” or “ATX-II” or “neurotoxin 2” or “Anemonia viridis toxin 2” or δ-AITX-Avd1c” refers to a toxin isolated from the venom of Anemonia sulcata. One example of an Av2 polypeptide is a polypeptide having the amino acid sequence of SEQ ID NO: 588.

[0067] “Av3” refers to a polypeptide isolated from the sea anemone, Anemonia viridis, which can target receptor site 3 on α-subunit III of voltage-gated sodium channels. One example of an Av3 polypeptide is an Av3 polypeptide having the amino acid sequence of SEQ ID NO: 44 (NCBI Accession No. P01535.1).

[0068] “AVP” or “Av3 variant polypeptides” refers to an Av3 polypeptide sequence and/or a polypeptide encoded by a variant Av3 polynucleotide sequence that has been altered to produce a non-naturally occurring polypeptide and/or polynucleotide sequence.

[0069] “BAAS” means barley alpha-amylase signal peptide, and is an example of an ERSP. One example of a BAAS is a BAAS having the amino acid sequence of SEQ ID NO:37 (NCBI Accession No. AAA32925.1).

[0070] “Biomass” refers to any measured plant product.

[0071] “Binary vector” or “binary expression vector” means an expression vector which can replicate itself in both E. coli strains and Agrobacterium strains. Also, the vector contains a region of DNA (often referred to as t-DNA) bracketed by left and right border sequences that is recognized by virulence genes to be copied and delivered into a plant cell by Agrobacterium.

[0072] “bp” or “base pair” refers to a molecule comprising two chemical bases bonded to one another. For example, a DNA molecule consists of two winding strands, wherein each strand has a backbone made of an alternating deoxyribose and phosphate groups. Attached to each deoxyribose is one of four bases, i.e., adenine (A), cytosine (C), guanine (G), or thymine (T), wherein adenine forms a base pair with thymine, and cytosine forms a base pair with guanine.

[0073] “Bt toxins” refers to fermentation solids, spores, and toxins produced by Bacillus thuringiensis (Bt)—a Gram positive, spore-forming bacterium, such as Bacillus thuringiensis var. kurstaki (Btk), Bacillus thuringiensis var. tenebrionis (Btt), and Bacillus thuringiensis var. israelensis (Bti). During sporulation, Bacillus thuringiensis produces crystal proteins (i.e., proteinaceous inclusions), called δ-endotoxins, that have insecticidal action. In some embodiments, a Bt toxin can be crystal (Cry) proteins, cytolytic (Cyt) proteins, vegetative insecticidal proteins (Vips), or other toxin produced by a Bacillus thuringiensis.

[0074] “Bt-resistant” or “Bt-resistance” or “Bt-resistant insect” or “Bacillus thuringiensis-toxin-resistant insects” refers to a heritable change in the sensitivity of a pest population that is reflected in the repeated failure of a product (e.g., Bt) to achieve the expected level of control when used against that pest species.

[0075] “C-terminal” refers to the free carboxyl group (i.e., —COOH) that is positioned on the terminal end of a polypeptide.

[0076] “cDNA” or “copy DNA” or “complementary DNA” refers to a molecule that is complementary to a molecule of RNA. In some embodiments, cDNA may be either single-stranded or double-stranded. In some embodiments, cDNA can be a double-stranded DNA synthesized from a single stranded RNA template in a reaction catalyzed by a reverse transcriptase. In yet other embodiments, “cDNA” refers to all nucleic acids that share the arrangement of sequence elements found in native mature mRNA species, where sequence elements are exons and 3′ and 5′ non-coding regions. Normally mRNA species have contiguous exons, with the intervening introns removed by nuclear RNA splicing, to create a continuous open reading frame encoding the protein. In some embodiments, “cDNA” refers to a DNA that is complementary to and derived from an mRNA template.

[0077] “CEW” refers to Corn earworm.

[0078] “Cleavable Linker” see Linker.

[0079] “Cloning” refers to the process and/or methods concerning the insertion of a DNA segment (e.g., usually a gene of interest, for example tvp) from one source and recombining it with a DNA segment from another source (e.g., usually a vector, for example, a plasmid) and directing the recombined DNA, or “recombinant DNA” to replicate, usually by transforming the recombined DNA into a bacteria or yeast host.

[0080] “Chimeric gene” means a DNA sequence that encodes a gene derived from portions of one or more coding sequences to produce a new gene.

[0081] “Coding sequence” or “CDS” refers to a polynucleotide or nucleic acid sequence that can be transcribed (e.g., in the case of DNA) or translated (e.g., in the case of mRNA) into a peptide, polypeptide, or protein, when placed under the control of appropriate regulatory sequences and in the presence of the necessary transcriptional and/or translational molecular factors. The boundaries of the coding sequence are determined by a translation start codon at the 5′ (amino) terminus and a translation stop codon at the 3′ (carboxy) terminus. A transcription termination sequence will usually be located 3′ to the coding sequence. In some embodiments, a coding sequence may be flanked on the 5′ and/or 3′ ends by untranslated regions. In some embodiments, a coding sequence can be used to produce a peptide, a polypeptide, or a protein product. In some embodiments, the coding sequence may or may not be fused to another coding sequence or localization signal, such as a nuclear localization signal. In some embodiments, the coding sequence may be cloned into a vector or expression construct, may be integrated into a genome, or may be present as a DNA fragment.

[0082] “Codon optimization” refers to the production of a gene in which one or more endogenous, native, and/or wild-type codons are replaced with codons that ultimately still code for the same amino acid, but that are of preference in the corresponding host.

[0083] “Combination” refers to any association between two or among more items. The association can be spatial, temporal, and/or refer to the use of the two or more items for a common purpose. For example, a combination can be any spatiotemporal association, mixture, or permutation of: (1) one or more CRIPs, or pharmaceutically acceptable salt thereof; CRIP-insecticidal proteins, or pharmaceutically acceptable salt thereof; or combination thereof; and (2) one or more Insecticidal Agents (IA), as described herein, wherein (1) and (2) are used for the common purpose controlling or combating insect pests, such that the insect pest either dies, stops, or slows its movement; stops or slows its feeding; stops or slows its growth; becomes confused (e.g., with regard to navigation, locating food, sleeping behaviors, and/or mating); fails to pupate; interferes with reproduction; and/or precludes the insect from producing offspring and/or precludes the insect from producing fertile offspring.

[0084] Unless the context makes clear otherwise, the term “combination” may include simultaneous, separate, or sequentially administration of: (1) one or more CRIPs, or pharmaceutically acceptable salts thereof; one or more CRIP-insecticidal proteins, or pharmaceutically acceptable salts thereof; or a combination thereof; with (2) one or more Insecticidal Agents (IA), in any order of sequence.

[0085] It will be appreciated that in some embodiments, (1) one or more CRIPs, or pharmaceutically acceptable salt thereof; CRIP-insecticidal proteins, or pharmaceutically acceptable salt thereof; or combination thereof; and (2) one or more Insecticidal Agents (IA), are considered to be administered as a “combination or “in combination” whenever a pest or the locus of a pest is exposed to, or a locus to be protected from a pest (e.g., a plant) is treated with, a simultaneous exposure to both (1) and (2). In some embodiments, each of the (1) one or more CRIPs, or pharmaceutically acceptable salt thereof; CRIP-insecticidal proteins, or pharmaceutically acceptable salt thereof; or combination thereof; and (2) one or more Insecticidal Agents (IA), may be administered sequentially or according to a different schedule—indeed, it is not required that individual doses of different agents be administered at the same time, or in the same composition. Rather, so long as both the (1) one or more CRIPs, or pharmaceutically acceptable salt thereof; CRIP-insecticidal proteins, or pharmaceutically acceptable salt thereof; or combination thereof; and (2) one or more Insecticidal Agents (IA), remain pesticidally-effective (i.e., having insecticidal activity), they are considered to be administered “in combination.”

[0086] In some embodiments, “combination” refers to simultaneous administration of: (1) one or more CRIPs, or pharmaceutically acceptable salts thereof; one or more CRIP-insecticidal proteins, or pharmaceutically acceptable salts thereof; or a combination thereof; with (2) one or more Insecticidal Agents (IA).

[0087] In some embodiments, “combination” refers to separate administration of: (1) one or more CRIPs, or pharmaceutically acceptable salts thereof; one or more CRIP-insecticidal proteins, or pharmaceutically acceptable salts thereof; or a combination thereof; with (2) one or more Insecticidal Agents (IA).

[0088] In yet other embodiments, “combination” refers to sequential administration of (1) one or more CRIPs, or pharmaceutically acceptable salts thereof; one or more CRIP-insecticidal proteins, or pharmaceutically acceptable salts thereof; or a combination thereof; with (2) one or more Insecticidal Agents (IA), in any order.

[0089] In some embodiments of the present invention, i.e., wherein the administration of the combination is sequential or separate, the delay in administering the second component should not be such as to lose the beneficial effect of the combination in its entirety, i.e., the combination of (1) one or more CRIPs, or pharmaceutically acceptable salts thereof; one or more CRIP-insecticidal proteins, or pharmaceutically acceptable salts thereof; or a combination thereof; with (2) one or more Insecticidal Agents (IA). Where a combination of two or more components is administered separately or sequential, it will be understood that the dosage regime for each component may be different to and independent of the other components.

[0090] In some embodiments, the one or more CRIPs, or pharmaceutically acceptable salts thereof; one or more CRIP-insecticidal proteins, or pharmaceutically acceptable salts thereof; or a combination thereof, can be administered on the same day as the one or more Insecticidal Agents (IA). In other embodiments, the one or more CRIPs, or pharmaceutically acceptable salts thereof; one or more CRIP-insecticidal proteins, or pharmaceutically acceptable salts thereof; or a combination thereof, may be administered in the same week, or the same month as the one or more Insecticidal Agents (IA).

[0091] In some embodiments, a combination can be a “mixture.” As used herein, “mixture” refers to a combination of two or more agents, e.g., (1) one or more CRIPs, or pharmaceutically acceptable salts thereof; one or more CRIP-insecticidal proteins, or pharmaceutically acceptable salts thereof; or a combination thereof; with (2) one or more Insecticidal Agents (IA), that are in physical and/or chemical contact with one another.

[0092] “Complementary” refers to the topological compatibility or matching together of interacting surfaces of two polynucleotides as understood by those of skill in the art. Thus, two sequences are “complementary” to one another if they are capable of hybridizing to one another to form a stable anti-parallel, double-stranded nucleic acid structure. A first polynucleotide is complementary to a second polynucleotide if the nucleotide sequence of the first polynucleotide is substantially identical to the nucleotide sequence of the polynucleotide binding partner of the second polynucleotide, or if the first polynucleotide can hybridize to the second polynucleotide under stringent hybridization conditions. Thus, the polynucleotide whose sequence 5′-TATAC-3′ is complementary to a polynucleotide whose sequence is 5′-GTATA-3′.

[0093] “Conditioned medium” means the cell culture medium which has been used by cells and is enriched with cell derived materials but does not contain cells.

[0094] “Cone shell” or “cone snails” or “cones” refers to organisms belonging to the Conus genus of predatory marine gastropods. For example, in some embodiments, a cone shell can be one of the following species: Conus amadis; Conus catus; Conus ermineus; Conus geographus; Conus gloriamaris; Conus kinoshitai; Conus magus; Conus marmoreus; Conus purpurascens; Conus stercusmuscarum; Conus striatus; Conus textile; or Conus tulipa.

[0095] “Conotoxin” refers to the toxins isolated from cone shells that act by interfering with neuronal communication. For example, in some embodiments, a conotoxin can be an α-, ω-, δ-, or κ-conotoxins. Briefly, the α-conotoxins (and αA-&φ-conotoxins) target nicotinic ligand gated channels; ω-conotoxins target voltage-gated calcium channels; μ-conotoxins target the voltage-gated sodium channels; δ-conotoxins target the voltage-gated sodium channel; and κ-conotoxins target the voltage-gated potassium channel.

[0096] “Copy number” refers to the number of identical copies of a vector, an expression cassette, an amplification unit, a gene or indeed any defined nucleotide sequence, that are present in a host cell at any time. For example, in some embodiments, a gene or another defined chromosomal nucleotide sequence may be present in one, two, or more copies on the chromosome. An autonomously replicating vector may be present in one, or several hundred copies per host cell.

[0097] “CRIP” refers to Cysteine Rich Insecticidal Peptide. CRIPs are peptides rich in cysteine residues that, in some embodiments, are operable to form disulfide bonds between such cysteine residues. In some embodiments, CRIPS contain at least four (4), sometimes six (6), and sometimes eight (8) cysteine amino acids among proteins or peptides having at least 10 amino acids where the cysteines form two (2), three (3) or four (4) disulfide bonds. In some embodiments, the disulfide bonds contribute to the folding, three-dimensional structure, and activity of the insecticidal peptide. The cysteine-cysteine disulfide bonds, and the three dimensional structure they form, play a significant role in the insecticidal nature of these insecticidal peptides. In some embodiments, a CRIP may or may not comprise an inhibitor cystine knot (ICK) motif. For example, in some embodiments, a CRIP with an ICK motif can be an ACTX peptide from a spider; in other embodiments, a CRIP without an ICK motif, i.e., a non-ICK CRIP, can be a peptide like Av2 and Av3, peptides isolated from sea anemones. Non-ICK CRIPS can have 4-8 cysteines which form 2-4 disulfide bonds. These cysteine-cysteine disulfide bonds stabilized toxic peptides (CRIPS) can have remarkable stability when exposed to the environment. Many CRIPS are isolated from venomous animals such as spiders, scorpions, snakes and sea snails and sea anemones and they are toxic to insects.

[0098] “CRIP construct” refers to the three-dimensional arrangement/orientation of peptides, polypeptides, and/or motifs of operably linked polypeptide segments (e.g., a CRIP-insecticidal protein). For example, a CRIP expression ORF can include one or more of the following components or motifs: a CRIP; an endoplasmic reticulum signal peptide (ERSP); a linker peptide (L); a translational stabilizing protein (STA); or any combination thereof. And, as used herein, the term “CRIP construct” is used to describe the designation and/or orientation of the structural motif. In other words, the CRIP construct describes the arrangement and orientation of the components or motifs contained within a given CRIP expression ORF. For example, in some embodiments, a CRIP construct describes, without limitation, the orientation of one of the following CRIP-insecticidal proteins: ERSP-CRIP; ERSP-(CRIP)_{N}; ERSP-CRIP-L; ERSP-(CRIP)_{N}-L; ERSP-(CRIP-L)_{N}; ERSP-L-CRIP; ERSP-L-(CRIP)_{N}; ERSP-(L-CRIP)_{N}; ERSP-STA-CRIP; ERSP-STA-(CRIP)_{N}; ERSP-CRIP-STA; ERSP-(CRIP)_{N}-STA; ERSP-(STA-CRIP)_{N}; ERSP-(CRIP-STA)_{N}; ERSP-L-CRIP-STA; ERSP-L-STA-CRIP; ERSP-L-(CRIP-STA)_{N}; ERSP-L-(STA-CRIP)_{N}; ERSP-L-(CRIP)_{N}-STA; ERSP-(L-CRIP)_{N}-STA; ERSP-(L-STA-CRIP)_{N}; ERSP-(L-CRIP-STA)_{N}; ERSP-(L-STA)_{N}-CRIP; ERSP-(L-CRIP)_{N}-STA; ERSP-STA-L-CRIP; ERSP-STA-CRIP-L; ERSP-STA-L-(CRIP)_{N}; ERSP-(STA-L)_{N}-CRIP; ERSP-STA-(L-CRIP)_{N}; ERSP-(STA-L-CRIP)_{N}; ERSP-STA-(CRIP)_{N}-L; ERSP-STA-(CRIP-L)_{N}; ERSP-(STA-CRIP)_{N}-L; ERSP-(STA-CRIP-L)_{N}; ERSP-CRIP-L-STA; ERSP-CRIP-STA-L; ERSP-(CRIP)_{N}-STA-L ERSP-(CRIP-L)_{N}-STA; ERSP-(CRIP-STA)_{N}-L; ERSP-(CRIP-L-STA)_{N}; or ERSP-(CRIP-STA-L)_{N}; wherein N is an integer ranging from 1 to 200. See also “Structural motif.”

[0099] “CRIP ORF diagram” refers to the composition of one or more CRIP ORFs, as written out in diagram or equation form. For example, a “CRIP ORF diagram” can be written out as using acronyms or short-hand references to the DNA segments contained within the ORF. Accordingly, in one example, a “CRIP ORF diagram” may describe the polynucleotide segments encoding the ERSP, L, STA, and CRIP, by diagramming in equation form the DNA segments as “ersp” (i.e., the polynucleotide sequence that encodes the ERSP polypeptide); “linker” or “L” (i.e., the polynucleotide sequence that encodes the LINKER polypeptide); “sta” (i.e., the polynucleotide sequence that encodes the STA polypeptide), and “crip” (i.e., the polynucleotide sequence encoding a CRIP), respectively. An example of a CRIP ORF diagram is “ersp-sta-(linkerᵢ−cripⱼ)_{N},” or “ersp-(cripⱼ-linkerᵢ)_{N}-sta” and/or any combination of the DNA segments thereof.

[0100] “CRIP polynucleotide” refers to a polynucleotide or group of polynucleotides operable to express and/or encode an insecticidal protein comprising one or more CRIPs in addition to one or more non-CRIP polypeptides or proteins.

[0101] “CRIP-insecticidal protein” refers to any protein, peptide, polypeptide, amino acid sequence, configuration, or arrangement, consisting of: (1) at least one CRIP, or two or more CRIPs; and (2) additional peptides, polypeptides, or proteins, wherein said additional peptides, polypeptides, or proteins have the ability to do one or more of the following: (a) increase the mortality and/or inhibit the growth of insects when the insects are exposed to a CRIP-insecticidal protein, relative to a CRIP alone; (b) increase the expression of said CRIP-insecticidal protein, e.g., in a host cell or an expression system; and/or (c) affect the post-translational processing of the CRIP-insecticidal protein.

[0102] In some embodiments, an insecticidal protein can comprise a one or more CRIPs as disclosed herein. In some embodiments, a CRIP-insecticidal protein can be a polymer comprising two or more CRIPs. In some embodiments, the insecticidal protein can comprise a CRIP homopolymer, e.g., two or more CRIP monomers that are the same CRIP. In some embodiments, the insecticidal protein can comprise a CRIP heteropolymer, e.g., two or more CRIP monomers, wherein the CRIP monomers are different.

[0103] In some embodiments, a CRIP-insecticidal protein can be a polymer of amino acids that when properly folded or in its most natural thermodynamic state exerts an insecticidal activity against one or more insects.

[0104] In some embodiments, a CRIP-insecticidal protein can be a polymer comprising two or more CRIPs, wherein the CRIPs are operably linked via a linker peptide, e.g., a cleavable and/or non-cleavable linker. In some embodiments, a CRIP-insecticidal protein can refer to a one or more CRIPs operably linked with one or more proteins such as a stabilizing domain (STA); an endoplasmic reticulum signaling protein (ERSP); an insect cleavable or insect non-cleavable linker (L); and/or any other combination thereof. In some embodiments, a CRIP-insecticidal protein can be a non-naturally occurring protein comprising (1) a wild-type CRIP protein; and (2) additional peptides, polypeptides, or proteins, e.g., an ERSP; a linker; a STA; a UBI; or a histidine tag or similar marker.

[0105] “Culture” or “cell culture” refers to the maintenance of cells in an artificial, in vitro environment.

[0106] “Culturing” refers to the propagation of organisms on or in various kinds of media. For example, the term “culturing” can mean growing a population of cells under suitable conditions in a liquid or solid medium. In some embodiments, culturing refers to fermentative recombinant production of a heterologous polypeptide of interest and/or other desired end products (typically in a vessel or reactor).

[0107] “Cystine” refers to an oxidized cysteine-dimer. Cystines are sulfur-containing amino acids obtained via the oxidation of two cysteine molecules, and are linked with a disulfide bond.

[0108] “Defined medium” means a medium that is composed of known chemical components but does not contain crude proteinaceous extracts or by-products such as yeast extract or peptone.

[0109] “Degeneracy” or “codon degeneracy” refers to the phenomenon that one amino acid can be encoded by different nucleotide codons. Thus, the nucleic acid sequence of a nucleic acid molecule that encodes a protein or polypeptide can vary due to degeneracies. As a result of the degeneracy of the genetic code, many nucleic acid sequences can encode a given polypeptide with a particular activity; such functionally equivalent variants are contemplated herein.

[0110] “Desmethyllimocin B” refers to [(5R,7R,8R,9R,10R,13S,17S)-17-[(3R)-5-Hydroxyoxolan-3-yl]-4,4,8,10,13-pentamethyl-3,16-dioxo-6,7,9,11,12,17-hexahydro-5H-cyclopenta[a]phenanthren-7-yl] acetate.

[0111] “Disulfide bond” means a covalent bond between two cysteine amino acids derived by the coupling of two thiol groups on their side chains.

[0112] “DNA” refers to deoxyribonucleic acid, comprising a polymer of one or more deoxyribonucleotides or nucleotides (i.e., adenine [A], guanine [G], thymine [T], or cytosine [C]), which can be arranged in single-stranded or double-stranded form. For example, one or more nucleotides creates a polynucleotide.

[0113] “dNTPs” refers to the nucleoside triphosphates that compose DNA and RNA.

[0114] “Double expression cassette” refers to two heterologous polypeptide expression cassettes contained on the same vector.

[0115] “Double transgene peptide expression vector” or “double transgene expression vector” means a yeast expression vector that contains two copies of the heterologous polypeptide expression cassette.

[0116] “Endogenous” refers to a polynucleotide, peptide, polypeptide, protein, or process that naturally occurs and/or exists in an organism, e.g., a molecule or activity that is already present in the host cell before a particular genetic manipulation.

[0117] “Enhancer element” refers to a DNA sequence operably linked to a promoter, which can exert increased transcription activity on the promoter relative to the transcription activity that results from the promoter in the absence of the enhancer element.

[0118] “ER” or “Endoplasmic reticulum” is a subcellular organelle common to all eukaryotes where some post translation modification processes occur.

[0119] “ERSP” or “endoplasmic reticulum signal peptide” is an N-terminus sequence of amino acids that—during protein translation of the mRNA molecule encoding a CRIP—is recognized and bound by a host cell signal-recognition particle, which moves the protein translation ribosome/mRNA complex to the ER in the cytoplasm. The result is the protein translation is paused until it docks with the ER where it continues and the resulting protein is injected into the ER.

[0120] “ersp” refers to a polynucleotide encoding the peptide, ERSP.

[0121] “ER trafficking” means transportation of a cell expressed protein into ER for post-translational modification, sorting and transportation.

[0122] “Excipient” refers to any pharmacologically inactive, natural, or synthetic, component or substance that is formulated alongside (e.g., concomitantly), or subsequent to, the active ingredient of the present invention (i.e., a CRIP or CRIP-insecticidal protein). In some embodiments, an excipient can be any additive, adjuvant, binder, bulking agent, carrier, coating, diluent, disintegrant, filler, glidant, lubricant, preservative, vehicle, or combination thereof, with which a CRIP or CRIP-insecticidal protein of the present invention can be administered, and or which is useful in preparing a composition of the present invention. Excipients, include any such materials known in the art that are nontoxic and do not interact with other components of a composition. In some embodiments, excipients can be formulated alongside a CRIP or CRIP-insecticidal protein when preparing a composition for the purpose of bulking up compositions (thus often referred to as bulking agents, fillers or diluents). In other embodiments, an excipient can be used to confer an enhancement on the active ingredient in the final dosage form, such as facilitating absorption and/or solubility. In yet other embodiments, an excipient can be used to provide stability, or prevent contamination (e.g., microbial contamination). In other embodiments, an excipient can be used to confer a physical property to a composition (e.g., a composition that is a dry granular, or dry flowable powder physical form). Reference to an excipient includes both one and more than one such excipients. Suitable pharmaceutical excipients are described in Remington's Pharmaceutical Sciences, by E. W. Martin, the disclosure of which is incorporated herein by reference in its entirety.

[0123] “Expression cassette” refers to (1) a DNA sequence of interest, e.g., a polynucleotide operable to encode a CRIP; and one or more of the following: (2) promoters, terminators, and/or enhancer elements; (3) an appropriate mRNA stabilizing polyadenylation signal; (4) an internal ribosome entry site (IRES); (5) introns; and/or (6) post-transcriptional regulatory elements. The combination (1) with at least one of (2)-(6) is called an “expression cassette.” In some embodiments, there can be numerous expression cassettes cloned into a vector. For example, in some embodiments, there can be a first expression cassette comprising a polynucleotide operable to encode a CRIP. In alternative embodiments, there are two expression cassettes, each comprising a polynucleotide operable to encode a CRIP (i.e., a double expression cassette). In other embodiments, there are three expression cassettes operable to encode a CRIP (i.e., a triple expression cassette). In some embodiments, a double expression cassette can be generated by subcloning a second expression cassette into a vector containing a first expression cassette. In some embodiments, a triple expression cassette can be generated by subcloning a third expression cassette into a vector containing a first and a second expression cassette. Methods concerning expression cassettes and cloning techniques are well-known in the art and described herein. See also CRIP expression cassette.

[0124] “Expression ORF” means a nucleotide encoding a protein complex and is defined as the nucleotides in the ORF.

[0125] “FECT” means a transient plant expression system using Foxtail mosaic virus with elimination of coating protein gene and triple gene block.

[0126] “Fermentation beer” refers to spent fermentation medium, i.e., fermentation medium supernatant after removal of organisms, that has been inoculated with and consumed by a transformed host cell (e.g., a yeast cell operable to express a CRIP of the present invention). In some embodiments, fermentation beer refers to the solution that is recovered following the fermentation of the transformed host cell. The term “fermentation” refers broadly to the enzymatic and anaerobic or aerobic breakdown of organic substances (e.g., a carbon substrate) nutrient substances by microorganisms under controlled conditions (e.g., temperature, oxygen, pH, nutrients, and the like) to produce fermentation products (e.g., one or more peptides of the present invention). While fermentation typically describes processes that occur under anaerobic conditions, as used herein it is not intended that the term be solely limited to strict anaerobic conditions, as the term “fermentation” used herein may also occur processes that occur in the presence of oxygen.

[0127] “Fermentation solid(s)” refers to solids (including dissolved) that remain from fermentation beer during the yeast-based fermentation process, and consists essentially of salts, complex protein source, vitamins, and additional yeast byproducts having a molecular weight cutoff of from about 200 kDa to about 1 kDa.

[0128] “GFP” means a green fluorescent protein from the jellyfish, Aequorea victoria.

[0129] “HIS” or “His” refers to histidine. For example, in some embodiments, “HIS” or His” may refer to a histidine tag, e.g., a histidine tag having an amino acid sequence as set forth in SEQ ID NO: 591.

[0130] “Homologous” refers to the sequence similarity or sequence identity between two polypeptides or between two nucleic acid molecules. When a position in both of the two compared sequences is occupied by the same base or amino acid monomer subunit, e.g., if a position in each of two DNA molecules is occupied by adenine, then the molecules are homologous at that position. The percent of homology between two sequences is a function of the number of matching or homologous positions shared by the two sequences divided by the number of positions compared×100. Thus, in some embodiments, the term “homologous” refers to the sequence similarity between two polypeptide molecules, or between two nucleic acid molecules. When a position in both of the two compared sequences is occupied by the same base or amino acid monomeric subunit, e.g., if a position in each of two DNA molecules is occupied by adenine, then the molecules are homologous at that position. The homology between two sequences is a function of the number of matching or homologous positions shared by the two sequences. For example, if 6 of 10 of the positions in two sequences are matched or homologous then the two sequences are 60% homologous. By way of example, the DNA sequences ATTGCC and TATGGC share 50% homology.

[0131] The term “homology,” when used in relation to nucleic acids, refers to a degree of complementarity. There may be partial homology, or complete homology and thus identical. “Sequence identity” refers to a measure of relatedness between two or more nucleic acids, and is given as a percentage with reference to the total comparison length. The identity calculation takes into account those nucleotide residues that are identical and in the same relative positions in their respective larger sequences.

[0132] “Homologous recombination” refers to the event of substitution of a segment of DNA by another one that possesses identical regions (homologous) or nearly so. For example, in some embodiments, “homologous recombination” refers to a type of genetic recombination in which nucleotide sequences are exchanged between two similar or identical molecules of DNA. Briefly, homologous recombination is most widely used by cells to accurately repair harmful breaks that occur on both strands of DNA, known as double-strand breaks. Although homologous recombination varies widely among different organisms and cell types, most forms involve the same basic steps: after a double-strand break occurs, sections of DNA around the 5′ ends of the break are cut away in a process called resection. In the strand invasion step that follows, an overhanging 3′ end of the broken DNA molecule then “invades” a similar or identical DNA molecule that is not broken. After strand invasion, the further sequence of events may follow either of two main pathways, i.e., the double-strand break repair pathway, or the synthesis-dependent strand annealing pathway. Homologous recombination is conserved across all three domains of life as well as viruses, suggesting that it is a nearly universal biological mechanism. For example, in some embodiments, homologous recombination can occur using a site-specific integration (SSI) sequence, whereby there is a strand exchange crossover event between nucleic acid sequences substantially similar in nucleotide composition. These crossover events can take place between sequences contained in the targeting construct of the invention (i.e., the SSI sequence) and endogenous genomic nucleic acid sequences (e.g., the polynucleotide encoding the peptide subunit). In addition, in some embodiments, it is possible that more than one site-specific homologous recombination event can occur, which would result in a replacement event in which nucleic acid sequences contained within the targeting construct have replaced specific sequences present within the endogenous genomic sequences.

[0133] “ICK motif” or “ICK motif protein” or “inhibitor cystine knot motif” or “ICK peptides” or “cystine knot motif” or “cystine knot peptides” refers to a 16 to 60 amino acid peptide with at least 6 half-cystine core amino acids having three disulfide bridges, wherein the 3 disulfide bridges are covalent bonds and of the six half-cystine residues the covalent disulfide bonds are between the first and fourth, the second and fifth, and the third and sixth half-cystines, of the six core half-cystine amino acids starting from the N-terminal amino acid. In general this type of peptide comprises a beta-hairpin secondary structure, normally composed of residues situated between the fourth and sixth core half-cystines of the motif, the hairpin being stabilized by the structural crosslinking provided by the motif's three disulfide bonds. Note that additional cysteine/cystine or half-cystine amino acids may be present within the inhibitor cystine knot motif.

[0134] “ick” means a nucleotide encoding an ICK motif protein.

[0135] “ICK motif protein expression ORF” or “expression ORF” means a nucleotide encoding an ICK motif protein complex and is defined as the nucleotides in the ORF.

[0136] “ICK motif protein expression vector” or “ICK expression vector” or “ICK motif expression vector” means a binary vector which contains an expression ORF. The binary vector also contains the necessary transcription promoter and terminator sequence surrounding the expression ORF to promote expression of the ORF and the protein it encodes.

[0137] “Identity” refers to a relationship between two or more polypeptide sequences or two or more polynucleotide sequences, as determined by comparing said sequences. The term “identity” also means the degree of sequence relatedness between polypeptide or polynucleotide sequences, as the case may be, as determined by the match between strings of such sequences. “Identity” and “similarity” can be readily calculated by any one of the myriad methods known to those having ordinary skill in the art, including but not limited to those described in: Computational Molecular Biology, Lesk, A. M., ed., Oxford University Press, New York, 1988; Biocomputing: Informatics and Genome Projects, Smith, D. W., ed., Academic Press, New York, 1993; Computer Analysis of Sequence Data, Part 1, Griffin, A. M., and Griffin, H. G., eds., Humana Press, New Jersey, 1994, Sequence Analysis in Molecular Biology, von Heinje, G., Academic Press, 1987; and Sequence Analysis Primer, Gribskov, M. and Devereux, J., eds., M Stockton Press, New York, 1991; and Carillo, H., and Lipman, D., SIAM J. Applied Math., 48: 1073 (1988), the disclosures of which are incorporated herein by reference in their entireties. Furthermore, methods to determine identity and similarity are codified in publicly available computer programs. For example in some embodiments, methods to determine identity and similarity between two sequences include, but are not limited to, the GCG program package (Devereux, J., et al., Nucleic Acids Research 12(1): 387 (1984)), BLASTP, BLASTN, and FASTA (Altschul, S. F. et al., J. Molec. Biol. 215: 403-410 (1990). The BLAST X program is publicly available from NCBI and other sources (BLAST Manual, Altschul, S., et al., NCBI NLM NIH Bethesda, Md. 20894; Altschul, S., et al., J. Mol. Biol. 215: 403-410 (1990), the disclosures of which are incorporated herein by reference in their entireties.

[0138] “IGER” means a name for a short peptide, based on its actual sequence of one letter codes. It is an example of an intervening linker.

[0139] “in vivo” refers to the natural environment (e.g., an animal or a cell) and to processes or reactions that occur within a natural environment.

[0140] “Inactive” refers to a condition wherein something is not in a state of use, e.g., lying dormant and/or not working. For example, when used in the context of a gene or when referring to a gene, the term inactive means said gene is no longer actively synthesizing a gene product, having said gene product translated into a protein, or otherwise having the gene perform its normal function. For example, in some embodiments, the term inactive can refer the failure of a gene to transcribe RNA, a failure of RNA processing (e.g., pre-mRNA processing; RNA splicing; or other post-transcriptional modifications); interference with non-coding RNA maturation; interference with RNA export (e.g., from the nucleus to the cytoplasm); interference with translation; protein folding; translocation; protein transport; and/or inhibition and/or interference with any of the molecules polynucleotides, peptides, polypeptides, proteins, transcription factors, regulators, inhibitors, or other factors that take part in any of the aforementioned processes.

[0141] “Inoperable” refers to the condition of a thing not functioning, malfunctioning, or no longer able to function. For example, when used in the context of a gene or when referring to a gene, the term inoperable means said gene is no longer able to operate as it normally would, either permanently or transiently. For example, “inoperable,” in some embodiments, means that a gene is no longer able to synthesize a gene product, having said gene product translated into a protein, or is otherwise unable to gene perform its normal function. For example, in some embodiments, the term inoperable can refer the failure of a gene to transcribe RNA, a failure of RNA processing (e.g., pre-mRNA processing; RNA splicing; or other post-transcriptional modifications); interference with non-coding RNA maturation; interference with RNA export (e.g., from the nucleus to the cytoplasm); interference with translation; protein folding; translocation; protein transport; and/or inhibition and/or interference with any of the molecules polynucleotides, peptides, polypeptides, proteins, transcription factors, regulators, inhibitors, or other factors that take part in any of the aforementioned processes.

[0142] “Insect” includes all organisms in the class “Insecta.” The term “pre-adult” insects refers to any form of an organism prior to the adult stage, including, for example, eggs, larvae, and nymphs. As used herein, the term “insect refers to any arthropod and nematode, including acarids, and insects known to infest all crops, vegetables, and trees and includes insects that are considered pests in the fields of forestry, horticulture and agriculture. Examples of specific crops that might be protected with the methods disclosed herein are soybean, corn, cotton, alfalfa and the vegetable crops. A list of specific crops and insects is enclosed herein.

[0143] “Insect gut environment” or “gut environment” means the specific pH and proteinase conditions found within the fore, mid or hind gut of an insect or insect larva.

[0144] “Insect hemolymph environment” means the specific pH and proteinase conditions of found within an insect or insect larva.

[0145] “Insecticidal activity” means that upon or after exposing the insect to compounds, agents, or peptides, the insect either dies stops or slows its movement; stops or slows its feeding; stops or slows its growth; becomes confused (e.g., with regard to navigation, locating food, sleeping behaviors, and/or mating); fails to pupate; interferes with reproduction; and/or precludes the insect from producing offspring and/or precludes the insect from producing fertile offspring.

[0146] “Insecticidal Agent” or “IA” or “Agent” refers to one or more chemical substances, molecules, nucleotides, polynucleotides, RNA, DNA, peptides, polypeptides, proteins, lipids, glycolipids, enzymes, toxins, toxicants, poisons, insecticides, pesticides, organic compounds, inorganic compounds, viruses, prokaryote organisms, or eukaryote organisms (and the agents produced from said prokaryote or eukaryote organisms). In some embodiments, an IA includes, but is not limited to, members selected from the categories of RNAi; Stomach poisons; Inhibitors of chitin biosynthesis type 0; Inhibitors of chitin biosynthesis, type 1; Insect viruses; Compounds isolated from Azadirachta indica; Compounds with unknown MOAs; Bacteria (and products therefrom); Fungi (and products therefrom); Nematodes (and products therefrom); Botanical essences; Mechanical disruptors; Fluorescent brighteners; Silica nanospheres; Chitinases; Lectins; Membrane Attack Complex/Perforin (MACPF) proteins; Plant virus coat protein-toxin fusions; Glycan binding domain/toxin fusion proteins; Acetylcholinesterase (AchE) inhibitors; GABA-gated chloride channel blockers; Sodium channel modulators; Nicotinic acetylcholine receptor (nAchR) Competitive Modulators; Nicotinic acetylcholine receptor (nAchR) allosteric modulators—site I; Glutamate-gated chloride channel (GluCl) allosteric modulators; Juvenile hormone mimics; Miscellaneous non-specific (multi-site) inhibitors; Chordotonal organ TRPV channel modulators; Mite growth inhibitors; Inhibitors of mitochondrial ATP synthase; Uncouplers of oxidative phosphorylation via disruption of the proton gradient; Nicotinic acetylcholine receptor (nAchR) channel blockers; Moulting disruptors (dipteran); Ecdysone receptor agonists; Octopamine receptor agonists; Mitochondrial complex III electron transport inhibitors; Mitochondrial complex I electron transport inhibitors; Voltage-dependent sodium channel blockers; Inhibitors of acetyl co-enzyme A carboxylase; Mitochondrial complex IV electron transport inhibitors; Mitochondrial complex II electron transport inhibitors; Ryanodine receptor modulators; Chordotonal organ modulators—undefined target site; or GABA-gated chloride channel allosteric modulators. In some embodiments, an Insecticidal Agent can be a polymer of amino acids, a peptide, a polypeptide, or a protein; such peptide-IAs can be made and/or used in accordance with any of the methods pertaining to peptides and/or proteins as described herein.

[0147] “Integrative expression vector” or “integrative vector” means a yeast expression vector which can insert itself into a specific locus of the yeast cell genome and stably becomes a part of the yeast genome.

[0148] “Insecticide-resistant” or “Insecticide-resistance” or “Insecticide-resistant insect” or refers to a heritable change in the sensitivity of a pest population to an insecticide that is reflected in the repeated failure of said insecticide to achieve the expected level of control when used against that pest species.

[0149] “Intervening linker” refers to a short peptide sequence in the protein separating different parts of the protein, or a short DNA sequence that is placed in the reading frame in the ORF to separate the upstream and downstream DNA sequences. For example, in some embodiments, an intervening linker may be used allowing proteins to achieve their independent secondary and tertiary structure formation during translation. In some embodiments, the intervening linker can be either resistant or susceptible to cleavage in plant cellular environments, in the insect and/or lepidopteran gut environment, and in the insect hemolymph and lepidopteran hemolymph environment.

[0150] “Isolated” refers to separating a thing and/or a component from its natural environment, e.g., a toxin isolated from a given genus or species means that toxin is separated from its natural environment, e.g., taken out of a WT organism.

[0151] “Kappa-ACTX peptide” refers to an excitatory toxin that inhibits insect calcium-activated potassium (KCa) channels (Slo-type). As used herein, “Kappa-ACTX peptide” can refer to peptides isolated from the Australian Blue Mountains Funnel-web Spider, Hadronyche versuta, or variants thereof.

[0152] “kb” refers to kilobase, i.e., 1000 bases. As used herein, the term “kb” means a length of nucleic acid molecules. For example, 1 kb refers to a nucleic acid molecule that is 1000 nucleotides long. A length of double-stranded DNA that is 1 kb long, contains two thousand nucleotides (i.e., one thousand on each strand). Alternatively, a length of single-stranded RNA that is 1 kb long, contains one thousand nucleotides.

[0153] “kDa” refers to kilodalton, a unit equaling 1,000 daltons; a “dalton” or “Da” is a unit of molecular weight (MW).

[0154] “Knock in” or “knock-in” or “knocks-in” or “knocking-in” refers to the replacement of an endogenous gene with an exogenous or heterologous gene, or part thereof. For example, in some embodiments, the term “knock-in” refers to the introduction of a nucleic acid sequence encoding a desired protein to a target gene locus by homologous recombination, thereby causing the expression of the desired protein. In some embodiments, a “knock-in” mutation can modify a gene sequence to create a loss-of-function or gain-of-function mutation. The term “knock-in” can refer to the procedure by which a exogenous or heterologous polynucleotide sequence or fragment thereof is introduced into the genome (e.g., “they performed a knock-in” or “they knocked-in the heterologous gene”), or the resulting cell and/or organism (e.g., “the cell is a “knock-in” or “the animal is a “knock-in”).

[0155] “Knock out” or “knockout” or “knock-out” or “knocks-out” or “knocking-out” refers to a partial or complete suppression of the expression gene product (e.g., mRNA) of a protein encoded by an endogenous DNA sequence in a cell. In some embodiments, the “knock-out” can be effectuated by targeted deletion of a whole gene, or part of a gene encoding a peptide, polypeptide, or protein. As a result, the deletion may render a gene inactive, partially inactive, inoperable, partly inoperable, or otherwise reduce the expression of the gene or its products in any cell in the whole organism and/or cell in which it is normally expressed. The term “knock-out” can refer to the procedure by which an endogenous gene is made completely or partially inactive or inoperable (e.g., “they performed a knock-out” or “they knocked-out the endogenous gene”), or the resulting cell and/or organism (e.g., “the cell is a “knock-out” or “the animal is a “knock-out”).

[0156] “Knockdown dose 50” or “KD₅₀” refers to the median dose required to cause paralysis or cessation of movement in 50% of a population, for example a population of Musca domestica (common housefly) and/or Aedes aegypti (mosquito).

[0157] “1” or “linker” refers to a nucleotide encoding linker peptide.

[0158] “L” in the proper context refers to a linker peptide, which links a translational stabilizing protein (STA) with an additional polypeptide, e.g., a heterologous peptide, and/or multiple heterologous peptides. When referring to amino acids, “L” can also mean leucine.

[0159] “LAC4 promoter” or “Lac4 promoter” refers to a DNA segment comprised of the promoter sequence derived from the K. lactis β-galactosidase gene. The LAC4 promoters is strong and inducible reporter that is used to drive expression of exogenous genes transformed into yeast.

[0160] “LAC4 terminator” or “Lac4 terminator” refers to a DNA segment comprised of the transcriptional terminator sequence derived from the K. lactis β-galactosidase gene.

[0161] “LD₂₀” refers to a dose required to kill 20% of a population.

[0162] “LD₅₀” refers to lethal dose 50 which means the dose required to kill 50% of a population.

[0163] “Lepidopteran gut environment” means the specific pH and proteinase conditions found within the fore, mid or hind gut of a lepidopteran insect or larva.

[0164] “Lepidopteran hemolymph environment” means the specific pH and proteinase conditions of found within lepidopteran insect or larva.

[0165] “Linker” or “LINKER” or “peptide linker” or “L” or “intervening linker” refers to a short peptide sequence operable to link two peptides together. Linker can also refer to a short DNA sequence that is placed in the reading frame of an ORF to separate an upstream and downstream DNA sequences. In some embodiments, a linker can be cleavable by an insect protease. In some embodiments, a linker may allow proteins to achieve their independent secondary and tertiary structure formation during translation. In some embodiments, the linker can be either resistant or susceptible to cleavage in plant cellular environments, in the insect and/or lepidopteran gut environment, and/or in the insect hemolymph and lepidopteran hemolymph environment. In some embodiments, a linker can be cleaved by a protease, e.g., in some embodiments, a linker can be cleaved by a plant protease (e.g., papain, bromelain, ficin, actinidin, zingibain, and/or cardosins), an insect protease, a fungal protease, a vertebrate protease, an invertebrate protease, a bacteria protease, a mammal protease, a reptile protease, or an avian protease. In some embodiments, a linker can be cleavable or non-cleavable. In some embodiments, a linker comprises a binary or tertiary region, wherein each region is cleavable by at least two types of proteases: one of which is an insect and/or nematode protease and the other one of which is a human protease. In some embodiments, a linker can have one of (at least) three roles: to cleave in the insect gut environment, to cleave in the plant cell, or to be designed not to intentionally cleave.

[0166] “Medium” (plural “media”) refers to a nutritive solution for culturing cells in cell culture.

[0167] “MOA” refers to mechanism of action.

[0168] “Molecular weight (MW)” refers to the mass or weight of a molecule, and is typically measured in “daltons (Da)” or kilodaltons (kDa). In some embodiments, MW can be calculated using sodium dodecyl sulfate polyacrylamide gel electrophoresis (SDS-PAGE), analytical ultracentrifugation, or light scattering. In some embodiments, the SDS-PAGE method is as follows: the sample of interest is separated on a gel with a set of molecular weight standards. The sample is run, and the gel is then processed with a desired stain, followed by destaining for about 2 to 14 hours. The next step is to determine the relative migration distance (Rf) of the standards and protein of interest. The migration distance can be determined using the following equation:

$$Rf = \frac{Migration distance of the protein}{Migration distance of the dye front} \qquad Formula ( III )$$

[0169] Next, the logarithm of the MW can be determined based on the values obtained for the bands in the standard; e.g., in some embodiments, the logarithm of the molecular weight of an SDS-denatured polypeptide and its relative migration distance (Rf) is plotted into a graph. After plotting the graph, interpolating the value derived will provide the molecular weight of the unknown protein band.

[0170] “Motif” refers to a polynucleotide or polypeptide sequence that is implicated in having some biological significance and/or exerts some effect or is involved in some biological process.

[0171] “Multiple cloning site” or “MCS” refers to a segment of DNA found on a vector that contains numerous restriction sites in which a DNA sequence of interest can be inserted.

[0172] “Mutant” refers to an organism, DNA sequence, amino acid sequence, peptide, polypeptide, or protein, that has an alteration or variation (for example, in the nucleotide sequence or the amino acid sequence), which causes said organism and/or sequence to be different from the naturally occurring or wild-type organism, wild-type sequence, and/or reference sequence with which the mutant is being compared. In some embodiments, this alteration or variation can be one or more nucleotide and/or amino acid substitutions or modifications (e.g., deletion or addition). In some embodiments, the one or more amino acid substitutions or modifications can be conservative; here, such a conservative amino acid substitution and/or modification in a “mutant” does not substantially diminish the activity of the mutant in relation to its non-mutant form. For example, in some embodiments, a “mutant” possesses one or more conservative amino acid substitutions when compared to a peptide with a disclosed and/or claimed sequence, as indicated by a SEQ ID NO.

[0173] “N-terminal” refers to the free amine group (i.e., —NH₂) that is positioned on beginning or start of a polypeptide.

[0174] “NCBI” refers to the National Center for Biotechnology Information.

[0175] “nm” refers to nanometers.

[0176] “Non-ICK CRIPS” refers to peptides having 4-8 cysteines which form 2-4 disulfide bonds. Non-ICK peptides include cystine knot peptides that are not ICK peptides. Non-ICK peptides may have different disulfide bond connectivity patterns than ICKs. Examples of a Non-ICK CRIP are peptides like Av2 and Av3, isolated from sea anemones; these anemone peptides are examples of a class of compounds that modulate sodium channels in the insect peripheral nervous system (PNS).

[0177] “Non-Polar amino acid” is an amino acid that is weakly hydrophobic and includes glycine, alanine, proline, valine, leucine, isoleucine, phenylalanine and methionine. Glycine or gly is the most preferred non-polar amino acid for the dipeptides of this invention.

[0178] “Normalized peptide yield” means the peptide yield in the conditioned medium divided by the corresponding cell density at the point the peptide yield is measured. The peptide yield can be represented by the mass of the produced peptide in a unit of volume, for example, mg per liter or mg/L, or by the UV absorbance peak area of the produced peptide in the HPLC chromatograph, for example, mAu·sec. The cell density can be represented by visible light absorbance of the culture at wavelength of 600 nm (OD600).

[0179] “OD” refers to optical density. Typically, OD is measured using a spectrophotometer. When measuring growth over time of a cell population, OD600 is preferable to UV spectroscopy; this is because at a 600 nm wavelength, the cells will not be harmed as they would under too much UV light.

[0180] “OD660 nm” or “OD_{660 nm}” refers to optical densities at 660 nanometers (nm).

[0181] “Omega peptide” or “omega toxin,” or “omega-ACTX-Hv1a,” or “native omegaACTX-Hv1a” all refer to an ACTX peptide which was first isolated from a spider known as the Australian Blue Mountains Funnel-web Spider, Hadronyche versuta. Omega peptide is a positive allosteric modulators of the nicotinic acetylcholine receptor, and may also be a dual antagonist to insect voltage-gated Ca²⁺ channels and voltage-gated K⁺ channels. See Chambers et al., Insecticidal spider toxins are high affinity positive allosteric modulators of the nicotinic acetylcholine receptor. FEBS Lett. 2019 June; 593(12):1336-1350; and Windley et al., Lethal effects of an insecticidal spider venom peptide involve positive allosteric modulation of insect nicotinic acetylcholine receptors. Neuropharmacology. 2017 December; 127:224-242, the disclosures of which are incorporated herein by reference in their entireties.

[0182] “One letter code” means the peptide sequence which is listed in its one letter code to distinguish the various amino acids in the primary structure of a protein: alanine=A, arginine=R, asparagine=N, aspartic acid=D, asparagine or aspartic acid=B, cysteine=C, glutamic acid=E, glutamine=Q, glutamine or glutamic acid=Z, glycine=G, histidine=H, isoleucine=I, leucine=L, lysine=K, methionine=M, phenylalanine=F, proline=P, serine=S, threonine=T, tryptophan=W, tyrosine=Y, and valine=V.

[0183] “Operable” refers to the ability to be used, the ability to do something, and/or the ability to accomplish some function or result. For example, in some embodiments, “operable” refers to the ability of a polynucleotide, DNA sequence, RNA sequence, or other nucleotide sequence or gene to encode a peptide, polypeptide, and/or protein. For example, in some embodiments, a polynucleotide may be operable to encode a protein, which means that the polynucleotide contains information that imbues it with the ability to create a protein (e.g., by transcribing mRNA, which is in turn translated to protein).

[0184] “Operably linked” refers to a juxtaposition wherein the components so described are in a relationship permitting them to function in their intended manner. For example, in some embodiments, operably linked can refer to two or more DNA, peptide, or polypeptide sequences. In other embodiments, operably linked can mean that the two adjacent DNA sequences are placed together such that the transcriptional activation of one DNA sequence can act on the other DNA sequence. In yet other embodiments, the term “operably linked” can refer to two or more peptides and/or polypeptides, wherein said two or more peptides and/or polypeptides are connected in such a way as to yield a single polypeptide chain; alternatively, the term operably linked can refer to two or more peptides that are connected in such a way that one peptide exerts some effect on the other. In yet other embodiments, operably linked can refer to two adjacent DNA sequences are placed together such that the transcriptional activation of one can act on the other.

[0185] “ORF” or “open reading frame” refers to a length of RNA or DNA sequence, between a translation start signal (e.g., AUG or ATG, respectively) and any one or more of the known termination codons, which encodes one or more polypeptide sequences. Put another way, the ORF describes the frame of reference as seen from the point of view of a ribosome translating the RNA code, insofar that the ribosome is able to keep reading (i.e., adding amino acids to the nascent protein) because it has not encountered a stop codon. Thus, “open reading frame” or “ORF” refers to the amino acid sequence encoded between translation initiation and termination codons of a coding sequence. Here, the terms “initiation codon” and “termination codon” refer to a unit of three adjacent nucleotides (i.e., a codon) in a coding sequence that specifies initiation and chain termination, respectively, of protein synthesis (mRNA translation).

[0186] In some embodiments, an ORF is a continuous stretch of codons that begins with a start codon (usually ATG for DNA, and AUG for RNA) and ends at a stop codon (usually UAA, UAG or UGA). In other embodiments, an ORF can be length of RNA or DNA sequence, between a translation start signal (e.g., AUG or ATG) and any one or more of the known termination codons, wherein said length of RNA or DNA sequence encodes one or more polypeptide sequences. In some other embodiments, an ORF can be a DNA sequence encoding a protein which begins with an ATG start codon and ends with a TGA, TAA or TAG stop codon. ORF can also mean the translated protein that the DNA encodes. Generally, those having ordinary skill in the art distinguish the terms “open reading frame” and “ORF,” from the term “coding sequence,” based upon the fact that the broadest definition of “open reading frame” simply contemplates a series of codons that does not contain a stop codon. Accordingly, while an ORF may contain introns, the coding sequence is distinguished by referring to those nucleotides (e.g., concatenated exons) that can be divided into codons that are actually translated into amino acids by the ribosomal translation machinery (i.e., a coding sequence does not contain introns); however, as used herein, the terms “coding sequence”; “CDS”; “open reading frame”; and “ORF,” are used interchangeably.

[0187] “Out-recombined” or “out-recombination” refers to the removal of a gene and/or polynucleotide sequence (e.g., an endogenous gene) that is flanked by two site-specific recombination sites (e.g., the 5′- and 3′-nucleotide sequence of a target gene that is homologous to the homology arms of a target vector) during in vivo homologous recombination. See “knockout.”

[0188] “Parasporal crystal toxin” refers to any of the peptides, polypeptides, and/or proteins that are part of the parasporal body or parasporal crystal, which is a bipyramidal crystal containing one or more peptides, polypeptides, and/or proteins. When the parasporal body or parasporal crystal is ingested by an insect, this toxin-containing parasporal crystal dissolves in the alkaline gut juices, followed by cleavage via midgut proteases of the protoxin, which yields an active peptide toxin, e.g., a δ-endotoxin.

[0189] “Peptide expression cassette” or “expression cassette” means a DNA sequence which is composed of all the DNA elements necessary to complete transcription of an insecticidal protein in a biological expression system. In the described methods herein, it includes a transcription promoter, a DNA sequence to encode an α-mating factor signal sequence, a cleavage site, an insecticidal protein transgene, a stop codon and a transcription terminator.

[0190] “Peptide expression vector” means a host organism expression vector which contains a heterologous peptide transgene.

[0191] “Peptide expression yeast strain”, “peptide expression strain” or “peptide production strain” means a yeast strain which can produce a heterologous peptide.

[0192] “Peptide-IA” refers to Insecticidal Agents that are amino acids, peptides, polypeptides, and/or proteins.

[0193] “Peptide transgene” or “insecticidal peptide transgene” or “insecticidal protein transgene” refers to a DNA sequence that encodes a peptide of interest and can be translated in a biological expression system.

[0194] “Peptide yield” means the insecticidal peptide concentration in the conditioned medium which is produced from the cells of a peptide expression yeast strain. It can be represented by the mass of the produced peptide in a unit of volume, for example, mg per liter or mg/L, or by the UV absorbance peak area of the produced peptide in the HPLC chromatograph, for example, mAu·sec.

[0195] “Peritrophic membrane” means a lining inside the insect gut that traps large food particles can aid in their movement through the gut while allowing digestion, but also protecting the gut wall.

[0196] “Pest” includes, but is not limited to: insects, fungi, bacteria, nematodes, mites, ticks, and the like.

[0197] “Pesticidally-effective amount” refers to an amount of the pesticide that is able to bring about death to at least one pest, or to noticeably reduce pest growth, feeding, or normal physiological development. This amount will vary depending on such factors as, for example, the specific target pests to be controlled, the specific environment, location, plant, crop, or agricultural site to be treated, the environmental conditions, and the method, rate, concentration, stability, and quantity of application of the pesticidally-effective polypeptide composition. The formulations may also vary with respect to climatic conditions, environmental considerations, and/or frequency of application and/or severity of pest infestation.

[0198] “Pharmaceutically acceptable salt” is synonymous with agriculturally acceptable salt, and as used herein refers to a compound that is modified by making acid or base salts thereof.

[0199] “Plant” shall mean whole plants, plant tissues, plant organs (e.g., leaves, stems, roots, etc.), seeds, plant cells, propagules, embryos and progeny of the same. Plant cells can be differentiated or undifferentiated (e.g. callus, suspension culture cells, protoplasts, leaf cells, root cells, phloem cells, and pollen).

[0200] “Plant transgenic protein” means a protein from a heterologous species that is expressed in a plant after the DNA or RNA encoding it was delivered into one or more of the plant cells.

[0201] “Plant cleavable linker” means a cleavable linker peptide, or a nucleotide encoding a cleavable linker peptide, which contains a plant protease recognition site and can be cleaved during the protein expression process in the plant cell.

[0202] “Plant-incorporated protectant” or “PIP” means an insecticidal protein produced by transgenic plants, and the genetic material necessary for the plant to produce the protein.

[0203] “Plasmid” refers to a DNA segment that acts as a carrier for a gene of interest and, when transformed or transfected into an organism, can replicate and express the DNA sequence contained within the plasmid independently of the host organism. Plasmids are a type of vector, and can be “cloning vectors” (i.e., simple plasmids used to clone a DNA fragment and/or select a host population carrying the plasmid via some selection indicator) or “expression plasmids” (i.e., plasmids used to produce large amounts of polynucleotides and/or polypeptides).

[0204] “Polar amino acid” is an amino acid that is polar and includes serine, threonine, cysteine, asparagine, glutamine, histidine, tryptophan and tyrosine; preferred polar amino acids are serine, threonine, cysteine, asparagine and glutamine; with serine being most highly preferred.

[0205] “Polynucleotide” refers to a polymeric-form of nucleotides (e.g., ribonucleotides, deoxyribonucleotides, or analogs thereof) of any length; e.g., a sequence of two or more ribonucleotides or deoxyribonucleotides. As used herein, the term “polynucleotide” includes double- and single-stranded DNA, as well as double- and single-stranded RNA; it also includes modified and unmodified forms of a polynucleotide (modifications to and of a polynucleotide, for example, can include methylation, phosphorylation, and/or capping). In some embodiments, a polynucleotide can be one of the following: a gene or gene fragment (for example, a probe, primer, EST, or SAGE tag); genomic DNA; genomic DNA fragment; exon; intron; messenger RNA (mRNA); transfer RNA; ribosomal RNA; ribozyme; cDNA; recombinant polynucleotide; branched polynucleotide; plasmid; vector; isolated DNA of any sequence; isolated RNA of any sequence; nucleic acid probe; primer or amplified copy of any of the foregoing.

[0206] In yet other embodiments, a polynucleotide can refer to a polymeric-form of nucleotides operable to encode the open reading frame of a gene.

[0207] In some embodiments, a polynucleotide can refer to cDNA.

[0208] In some embodiments, polynucleotides can have any three-dimensional structure and may perform any function, known or unknown. The structure of a polynucleotide can also be referenced to by its 5′- or 3′-end or terminus, which indicates the directionality of the polynucleotide. Adjacent nucleotides in a single-strand of polynucleotides are typically joined by a phosphodiester bond between their 3′ and 5′ carbons. However, different internucleotide linkages could also be used, such as linkages that include a methylene, phosphoramidate linkages, etc. This means that the respective 5′ and 3′ carbons can be exposed at either end of the polynucleotide, which may be called the 5′ and 3′ ends or termini. The 5′ and 3′ ends can also be called the phosphoryl (PO₄) and hydroxyl (OH) ends, respectively, because of the chemical groups attached to those ends. The term polynucleotide also refers to both double- and single-stranded molecules. Unless otherwise specified or required, any embodiment that makes or uses a polynucleotide encompasses both the double-stranded form and each of two complementary single-stranded forms known or predicted to make up the double-stranded form.

[0209] In some embodiments, a polynucleotide can include modified nucleotides, such as methylated nucleotides and nucleotide analogs (including nucleotides with non-natural bases, nucleotides with modified natural bases such as aza- or deaza-purines, etc.). If present, modifications to the nucleotide structure can be imparted before or after assembly of the polynucleotide.

[0210] In some embodiments, a polynucleotide can also be further modified after polymerization, such as by conjugation with a labeling component. Additionally, the sequence of nucleotides in a polynucleotide can be interrupted by non-nucleotide components. One or more ends of the polynucleotide can be protected or otherwise modified to prevent that end from interacting in a particular way (e.g. forming a covalent bond) with other polynucleotides.

[0211] In some embodiments, a polynucleotide can be composed of a specific sequence of four nucleotide bases: adenine (A); cytosine (C); guanine (G); and thymine (T). Uracil (U) can also be present, for example, as a natural replacement for thymine when the polynucleotide is RNA. Uracil can also be used in DNA. Thus, the term “sequence” refers to the alphabetical representation of a polynucleotide or any nucleic acid molecule, including natural and non-natural bases.

[0212] The term “RNA molecule” or ribonucleic acid molecule refers to a polynucleotide having a ribose sugar rather than deoxyribose sugar and typically uracil rather than thymine as one of the pyrimidine bases. An RNA molecule of the invention is generally single-stranded, but can also be double-stranded. In the context of an RNA molecule from an RNA sample, the RNA molecule can include the single-stranded molecules transcribed from DNA in the cell nucleus, mitochondrion or chloroplast, which have a linear sequence of nucleotide bases that is complementary to the DNA strand from which it is transcribed.

[0213] In some embodiments, a polynucleotide can further comprise one or more heterologous regulatory elements. For example, in some embodiments, the regulatory element is one or more promoters; enhancers; silencers; operators; splicing signals; polyadenylation signals; termination signals; RNA export elements, internal ribosomal entry sites (IRES); poly-U sequences; or combinations thereof.

[0214] “Post-transcriptional gene silencing”, or “PTGS”, means a cellular process within living cells that suppress the expression of a gene.

[0215] “Post-transcriptional regulatory elements” are DNA segments and/or mechanisms that affect mRNA after it has been transcribed. Post-transcriptional mechanisms include splicing events, capping, addition of a Poly (A) tail, and other mechanisms known to those having ordinary skill in the art.

[0216] “Promoter” refers to a region of DNA to which RNA polymerase binds and initiates the transcription of a gene.

[0217] “Protein” has the same meaning as “peptide” and/or “polypeptide” in this document.

[0218] “Ratio” refers to the quantitative relation between two amounts showing the number of times one value contains or is contained within the other.

[0219] “Reading frame” refers to one of the six possible reading frames, three in each direction, of the double stranded DNA molecule. The reading frame that is used determines which codons are used to encode amino acids within the coding sequence of a DNA molecule. In some embodiments, a reading frame is a way of dividing the sequence of nucleotides in a polynucleotide and/or nucleic acid (e.g., DNA or RNA) into a set of consecutive, non-overlapping triplets.

[0220] “Recombinant DNA” or “rDNA” refers to DNA that is comprised of two or more different DNA segments.

[0221] “Recombinant vector” means a DNA plasmid vector into which foreign DNA has been inserted.

[0222] “Regulatory elements” refers to a genetic element that controls some aspect of the expression and/or processing of nucleic acid sequences. For example, in some embodiments, a regulatory element can be found at the transcriptional and post-transcriptional level. Regulatory elements can be cis-regulatory elements (CREs), or trans-regulatory elements (TREs). In some embodiments, a regulatory element can be one or more promoters; enhancers; silencers; operators; splicing signals; polyadenylation signals; termination signals; RNA export elements, internal ribosomal entry sites (IRES); poly-U sequences; and/or other elements that influence gene expression, for example, in a tissue-specific manner; temporal-dependent manner; to increase or decrease expression; and/or to cause constitutive expression.

[0223] “Restriction enzyme” or “restriction endonuclease” refers to an enzyme that cleaves DNA at a specified restriction site. For example, a restriction enzyme can cleave a plasmid at an EcoRI, SacII or BstXI restriction site allowing the plasmid to be linearized, and the DNA of interest to be ligated.

[0224] “Restriction site” refers to a location on DNA comprising a sequence of 4 to 8 nucleotides, and whose sequence is recognized by a particular restriction enzyme.

[0225] “Salannin” refers to a chemical compound isolated from Azadirachta indica that has insecticidal activity. In some embodiments, Salannin has a molecular formula of C₃₄H₄₄O₉, and a molecular weight of 596.7 g/mol.

[0226] “Sea anemone” refers to a group of marine animals of the order Actiniaria. Sea anemones are named after the anemone, which is a terrestrial flowering plant, due to colorful appearance many sea anemones possess. For example, in some embodiments, a sea anemone is one of the following species: Actinia equine; Anemonia erythraea; Anemonia sukata; Anemonia viridis; Anthopleura elegantissima; Anthopleura fuscoviridis; Anthopleura xanthogrammica; Bunodosoma caissarum; Bunodosoma cangicum; Bunodosoma granulifera; Heteractis crispa; Parasicyonis actinostoloides; Radianthus paumotensis; or Stoichactis helianthus.

[0227] “Selection gene” means a gene which confers an advantage for a genetically modified organism to grow under the selective pressure.

[0228] “Serovar” or “serotype” refers to a group of closely related microorganisms distinguished by a characteristic set of antigens. In some embodiments, a serovar is an antigenically and serologically distinct variety of microorganism

[0229] “sp.” refers to species.

[0230] “ssp.” or “subsp.” refers to subspecies.

[0231] “Sub cloning” or “subcloned” refers to the process of transferring DNA from one vector to another, usually advantageous vector. For example, polynucleotide encoding a mutant or a peptide can be subcloned into a pKlac1 plasmid subsequent to selection of yeast colonies transformed with pKLAC1 plasmids.

[0232] “SSI” is an acronym that is context dependent. In some contexts, it can refer to “site-specific integration,” which is used to refer to a sequence that will permit in vivo homologous recombination to occur at a specific site within a host organism's genome. Thus, in some embodiments, the term “site-specific integration” refers to the process directing a transgene to a target site in a host-organism's genome, allowing the integration of genes of interest into pre-selected genome locations of a host-organism. However, in other contexts, SSI can refer to “surface spraying indoors,” which is a technique of applying a variable volume sprayable volume of an insecticide onto surfaces where vectors rest, such as on walls, windows, floors and ceilings.

[0233] “STA” or “Translational stabilizing protein” or “stabilizing domain” or “stabilizing protein” (used interchangeably herein) means a peptide or protein with sufficient tertiary structure that it can accumulate in a cell without being targeted by the cellular process of protein degradation. The protein can be between 5 and 50 amino acids long. The translational stabilizing protein is coded by a DNA sequence for a protein that is operably linked with a sequence encoding an insecticidal protein or a CRIP in the ORF. The operably-linked STA can either be upstream or downstream of the CRIP and can have any intervening sequence between the two sequences (STA and CRIP) as long as the intervening sequence does not result in a frame shift of either DNA sequence. The translational stabilizing protein can also have an activity which increases delivery of the CRIP across the gut wall and into the hemolymph of the insect.

[0234] “sta” means a nucleotide encoding a translational stabilizing protein.

[0235] “Structural motif” refers to the three-dimensional arrangement of peptides and/or polypeptides, and/or the arrangement of operably linked polypeptide segments. For example, a polypeptide having an ERSP motif, an STA motif, a LINKER motif, and a CRIP polypeptide motif, has an overall “structural motif” of ERSP-STA-L-CRIP. See also “CRIP construct.”

[0236] “Ta1b” or “U1-agatoxin-Ta1b” or “Ta1bWT” or “wild-type U1-agatoxin-Ta1b” refers to a polypeptide isolated from the Hobo spider, Eratigena agrestis. One example of a U1-agatoxin-Ta1b is a polypeptide having the amino acid sequence of SEQ ID NO:1 (NCBI Accession No. 046167.1).

[0237] “Ta1b variant polynucleotide” or “U1-agatoxin-Ta1b variant polynucleotide” refers to a polynucleotide or group of polynucleotides operable to express and/or encode an insecticidal protein comprising one or more TVPs. The term “U1-agatoxin-Ta1b variant polynucleotide” when used to describe the U1-agatoxin-Ta1b variant polynucleotide sequence contained in a TVP expression ORF, its inclusion in a vector, and/or when describing the polynucleotides encoding an insecticidal protein, is described as “tvp” and/or “Tvp.”

[0238] “Toxin” refers to a venom and/or a poison, especially a protein or conjugated protein produced by certain animals, higher plants, and pathogenic bacteria. Generally, the term “toxin” is reserved natural products, e.g., molecules and peptides found in scorpions, spiders, snakes, poisonous mushrooms, etc., whereas the term “toxicant” is reserved for man-made products and/or artificial products e.g., man-made chemical pesticides. However, as used herein, the terms “toxin” and “toxicant” are used synonymously

[0239] “Transfection” and “transformation” both refer to the process of introducing exogenous and/or heterologous DNA or RNA (e.g., a vector containing a polynucleotide that encodes a CRIP) into a host organism (e.g., a prokaryote or a eukaryote). Generally, those having ordinary skill in the art sometimes reserve the term “transformation” to describe processes where exogenous and/or heterologous DNA or RNA are introduced into a bacterial cell; and reserve the term “transfection” for processes that describe the introduction of exogenous and/or heterologous DNA or RNA into eukaryotic cells. However, as used herein, the term “transformation” and “transfection” are used synonymously, regardless of whether a process describes the introduction exogenous and/or heterologous DNA or RNA into a prokaryote (e.g., bacteria) or a eukaryote (e.g., yeast, plants, or animals).

[0240] “Transgene” means a heterologous DNA sequence encoding a protein which is transformed into a plant.

[0241] “Transgenic host cell” means a cell which is transformed with a gene and has been selected for its transgenic status via an additional selection gene.

[0242] “Transgenic plant” means a plant that has been derived from a single cell that was transformed with foreign DNA such that every cell in the plant contains that transgene.

[0243] “Transient expression system” means an Agrobacterium tumefaciens-based system which delivers DNA encoding a disarmed plant virus into a plant cell where it is expressed. The plant virus has been engineered to express a protein of interest at high concentrations, up to 40% of the TSP.

[0244] “Triple expression cassette refers to three CRIP expression cassettes contained on the same vector.

[0245] “TRBO” means a transient plant expression system using Tobacco mosaic virus with removal of the viral coating protein gene.

[0246] “TSP” or “total soluble protein” means the total amount of protein that can be extracted from a plant tissue sample and solubilized into the extraction buffer.

[0247] “TVP” or “U1-agatoxin-Ta1b Variant Polypeptides (TVPs)” or “Ta1b Variant Polypeptides (TVPs)” refers to mutants or variants of the wild-type U1-agatoxin-Ta1b polypeptide sequence and/or a polynucleotide sequence encoding a wild-type U1-agatoxin-Ta1b polypeptide, that have been altered to produce a non-naturally occurring polypeptide and/or polynucleotide sequence. An exemplary wild-type U1-agatoxin-Ta1b polypeptide sequence is provided herein, having the amino acid sequence of SEQ ID NO: 1. An exemplary wild-type U1-agatoxin-Ta1b precursor polypeptide sequence is provided herein, having the amino acid sequence of SEQ ID NO: 48 (NCBI Accession No. 046167.1), which includes the signal sequence “MKLQLMICLVLLPCFFC” (SEQ ID NO: 59). In some embodiments, a TVP can have an amino acid sequence according to any of the amino acid sequences listed in Table 1. Accordingly, the term “TVP” refers to peptides having one or more mutations relative to the amino acid sequence set forth in SEQ ID NO: 1. In some embodiments, a TVP can have an amino acid sequence according to Formula (I):

E-P-D-E-I-C-R-X₁-X₂-M-X₃-N-K-E-F-T-Y-X₄-S-N-V-C-N-N-C-G-D-Q-V-A-A-C-E-A-E-C—F-X₅-N-D-V-Y-Z₁-A-C-H-E-A-Q-X₆-X₇ Formula (I)

[0248] wherein the polypeptide comprises at least one amino acid substitution relative to the wild-type sequence of U1-agatoxin-Ta1b as set forth in SEQ ID NO:1, and wherein X₁ is A, S, or N; X₂ is R, Q, N, A, G, N, L, D, V, M, I, C, E, T, or S; X₃ is T or P; X₄ is K or A; X₅ is R or A; Z₁ is T, S, A, F, P, Y, K, W, H, A, G, N, L, V, M, I, Q, C, E, or R; X₆ is K or absent; and X₇ is G or absent.

[0249] In some embodiments, a TVP can have an amino acid sequence according to Formula (II):

E-P-D-E-I-C-R-A-X₁-M-T-N-K-E-F-T-Y-K-S-N-V-C-N-N-C-G-D-Q-V-A-A-C-E-A-E-C—F-R-N-D-V-Y-Z₁-A-C-H-E-A-Q-K-G Formula (II)

[0250] wherein the polypeptide comprises at least one amino acid substitution relative to the wild-type sequence of U1-agatoxin-Ta1b as set forth in SEQ ID NO:1, and wherein X₁ is R or Q; and Z₁ is T or A; or a pharmaceutically acceptable salt thereof.

[0251] “U-ACTX-Hv1a” or “hybrid peptide” or “hybrid toxin” or “hybrid-ACTX-Hv1a” or “native hybridACTX-Hv1a” or “U peptide” or “U toxin” or “native U” or “native U-ACTX-Hv1a,” all refer to an ACTX peptide, which was discovered from a spider known as the Australian Blue Mountains Funnel-web Spider, Hadronyche versuta. U-ACTX-Hv1a is a positive allosteric modulators of the nicotinic acetylcholine receptor, and may also be a dual antagonist to insect voltage-gated Ca²⁺ channels and voltage-gated K⁺ channels. See Chambers et al., Insecticidal spider toxins are high affinity positive allosteric modulators of the nicotinic acetylcholine receptor. FEBS Lett. 2019 June; 593(12):1336-1350; and Windley et al., Lethal effects of an insecticidal spider venom peptide involve positive allosteric modulation of insect nicotinic acetylcholine receptors. Neuropharmacology. 2017 December; 127:224-242, the disclosures of which are incorporated herein by reference in their entireties. An exemplary U-ACTX-Hv1a peptide is provided in SEQ ID NO: 60.

[0252] “U+2 peptide” or “U+2 protein” or “U+2 toxin” or “U+2” or “U+2-ACTX-Hv1a” or “Spear” all refer to a U-ACTX-Hv1a having an additional dipeptide operably linked to the native peptide. The additional dipeptide that is operably linked to the U peptide is indicated by the “+2” or “plus 2” can be selected from among several peptides, any of which may result in a “U+2 peptide” with unique properties as discussed herein. In some preferred embodiments, the dipeptide is “GS”; an exemplary U+2-ACTX-Hv1a peptide is set forth in SEQ ID NO: 61.

[0253] “UBI” refers to ubiquitin. For example, in some embodiments, UBI can refer to a ubiquitin monomer isolated from Zea mays.

[0254] “var.” refers to varietas or variety. The term “var.” is used to indicate a taxonomic category that ranks below the species level and/or subspecies (where present). In some embodiments, the term “var.” represents members differing from others of the same subspecies or species in minor but permanent or heritable characteristics.

[0255] “Variant” or “variant sequence” or “variant peptide” refers to an amino acid sequence that possesses one or more conservative amino acid substitutions or conservative modifications. The conservative amino acid substitutions in a “variant” does not substantially diminish the activity of the variant in relation to its non-varied form. For example, in some embodiments, a “variant” possesses one or more conservative amino acid substitutions when compared to a peptide with a disclosed and/or claimed sequence, as indicated by a SEQ ID NO.

[0256] “Vector” refers to the DNA segment that accepts a foreign gene of interest (e.g., crip). The gene of interest is known as an “insert” or “transgene.”

[0257] “Vip” or “VIP” or “Vegetative Insecticidal Proteins” refer to proteins discovered from screening the supernatant of vegetatively grown strains of Bt for possible insecticidal activity. Vips have little or no similarity to Cry proteins. Of particular use and preference for use with this document are what have been called VIP3 or Vip3 proteins, which have Lepidopteran activity. Vips are thought to have a similar mode of action as Bt cry peptides.

[0258] “Vitrification” refers to a process of converting a material into a glass-like amorphous material. The glass-like amorphous solid may be free of any crystalline structure. Solidification of a vitreous solid occurs at the glass transition temperature (Tg).

[0259] “Wild type” or “WT” refers to the phenotype and/or genotype (i.e., the appearance or sequence) of an organism, polynucleotide sequence, and/or polypeptide sequence, as it is found and/or observed in its naturally occurring state or condition.

[0260] “Yeast expression vector” or “expression vector” or “vector” means a plasmid which can introduce a heterologous gene and/or expression cassette into yeast cells to be transcribed and translated.

[0261] “Yield” refers to the production of a peptide, and increased yields can mean increased amounts of production, increased rates of production, and an increased average or median yield and increased frequency at higher yields. The term “yield” when used in reference to plant crop growth and/or production, as in “yield of the plant” refers to the quality and/or quantity of biomass produced by the plant.

[0262] Throughout this specification, unless specifically stated otherwise or the context requires otherwise, reference to a single step, composition of matter, group of steps or group of compositions of matter shall be taken to encompass one and a plurality (i.e., one or more) of those steps, compositions of matter, groups of steps or group of compositions of matter.

[0263] The present disclosure is performed without undue experimentation using, unless otherwise indicated, conventional techniques of molecular biology, microbiology, virology, recombinant DNA technology, solid phase and liquid nucleic acid synthesis, peptide synthesis in solution, solid phase peptide synthesis, immunology, cell culture, and formulation. Such procedures are described, for example, in Sambrook, Fritsch & Maniatis, Molecular Cloning: A Laboratory Manual, Cold Spring Harbor Laboratories, New York, Second Edition (1989), whole of Vols I, II, and III; DNA Cloning: A Practical Approach, Vols. I and II (D. N. Glover, ed., 1985), IRL Press, Oxford, whole of text; Oligonucleotide Synthesis: A Practical Approach (M. J. Gait, ed, 1984) IRL Press, Oxford, whole of text, and particularly the papers therein by Gait, pp 1-22; Atkinson et al, pp 35-81; Sproat et al, pp 83-115; and Wu et al, pp 135-151; 4. Nucleic Acid Hybridization: A Practical Approach (B. D. Hames & S. J. Higgins, eds., 1985) IRL Press, Oxford, whole of text; Immobilized Cells and Enzymes: A Practical Approach (1986) IRL Press, Oxford, whole of text; Perbal, B., A Practical Guide to Molecular Cloning (1984); Methods In Enzymology (S. Colowick and N. Kaplan, eds., Academic Press, Inc.), whole of series; J. F. Ramalho Ortigao, “The Chemistry of Peptide Synthesis” In: Knowledge database of Access to Virtual Laboratory website (Interactiva, Germany); Sakakibara, D., Teichman, J., Lien, E. Land Fenichel, R. L. (1976). Biochem. Biophys. Res. Commun. 73 336-342; Merrifield, R. B. (1963). J. Am. Chem. Soc. 85, 2149-2154; Barany, G. and Merrifield, R. B. (1979) in “The Peptides” (Gross, E. and Meienhofer, 3. eds.), vol. 2, pp. 1-284, Academic Press, New York. 12. Wiinsch, E., ed. (1974) Synthese von Peptiden in Houben-Weyls Metoden der Organischen Chemie (Muler, E., ed.), vol. 15, 4th ed., Parts 1 and 2, Thieme, Stuttgart; Bodanszky, M. (1984) Principles of Peptide Synthesis, Springer-Verlag, Heidelberg; Bodanszky, M. & Bodanszky, A. (1984) The Practice of Peptide Synthesis, Springer-Verlag, Heidelberg; Bodanszky, M. (1985) Int. J. Peptide Protein Res. 25, 449-474; Handbook of Experimental Immunology, Vols. I-IV (D. M. Weir and C. C. Blackwell, eds., 1986, Blackwell Scientific Publications); and Animal Cell Culture: Practical Approach, Third Edition (John R. W. Masters, ed., 2000); each of these references are incorporated herein by reference in their entireties.

[0264] Throughout this specification, unless the context requires otherwise, the word “comprise,” or variations such as “comprises” or “comprising,” will be understood to imply the inclusion of a stated step or element or integer or group of steps or elements or integers but not the exclusion of any other step or element or integer or group of elements or integers.

[0265] All patent applications, patents, and printed publications referred to herein are incorporated by reference in their entirety to the same extent as if each individual publication, patent, or patent application was specifically and individually indicated to be incorporated by reference in its entirety. And, all patent applications, patents, and printed publications cited herein are incorporated herein by reference in the entireties, except for any definitions, subject matter disclaimers, or disavowals, and except to the extent that the incorporated material is inconsistent with the express disclosure herein, in which case the language in this disclosure controls.

[0266] Cysteine Rich Insecticidal Proteins (Crips)

[0267] The present invention provides combinations comprising (1) one or more CRIPs, or pharmaceutically acceptable salts thereof; one or more CRIP-insecticidal proteins, or pharmaceutically acceptable salts thereof; or a combination thereof; and (2) one or more Insecticidal Agents (IA). Several types of CRIPs are contemplated and taught herein. The CRIPs of the present invention, which can be used in combination with the Insecticidal Agents (IAs) of the present invention, are described in detail below. All CRIPs suitable for the combinations of the present invention and contemplated below include CRIP-insecticidal proteins.

[0268] Spider Peptides and Toxins

[0269] In some embodiments, a CRIP can be a spider toxin peptide or protein isolated from one of the following: Phoneutria nigriventer; Allagelena opulenta; Cupiennius salei; Plectreurys tristis; Coremiocnemis vanda; Haplopelma huwenum; Agelena orientalis; Allagelena opulenta; Segestria florentina; Apomastus schlingeri; Phoneutria keyserlingi; Macrothele gigas; Macrothele raveni; Missulena bradleyi; Pireneitega luctuosa; Phoneutria reidyi; Illawara wisharti; Eucratoscelus constrictus; Agelenopsis aperta; Hololena curta; Oxyopes lineatus; Brachypelma albiceps; or Brachypelma smithi.

[0270] In some embodiments, a CRIP can be isolated from Hadronyche versuta, or the Blue Mountain funnel web spider, Hadronyche venenata, Atrax robustus, Atrax formidabilis, or Atrax infensus.

[0271] In some embodiments, a CRIP can be any of the following spider peptides, polypeptides, and/or toxins: U+2-ACTX-Hv1a; Γ-CNTX-Pn1a; U13-ctenitoxin-Pn1a, U13-ctenitoxin-Pn1b,U13-ctenitoxin-Pn1c, U1-agatoxin-Aop1a, U1-ctenitoxin-Cs1a, U1-nemetoxin-Csp1a, U1-nemetoxin-Csp1b, U1-nemetoxin-Csp1c, U1-plectoxin-Pt1a, U1-plectoxin-Pt1b, U1-plectoxin-Pt1c, U1-plectoxin-Pt1d, U1-plectoxin-Pt1f, U1-theraphotoxin-Cv1a, U1-theraphotoxin-Hh1a_1, U1-theraphotoxin-Hh1a_2, U1-theraphotoxin-Hh1a_3, U1-theraphotoxin-Hh1b, U1-theraphotoxin-Hh1c_1, U1-theraphotoxin-Hh1c_2, U1-theraphotoxin-Hh1d, U1-theraphotoxin-Hh1e, U1-theraphotoxin-Hh1f_1, U1-theraphotoxin-Hh1f_2, U1-theraphotoxin-Hh1f_3, U1-theraphotoxin-Hh1f_4, U1-theraphotoxin-Hh1g, U2-agatoxin-Ao1a, U2-agatoxin-Aop1a, U2-ctenitoxin-Cs1a, U2-ctenitoxin-Pn1a, U2-cyrtautoxin-As1a, U2-segestritoxin-Sf1a, U2-segestritoxin-Sf1b, U2-segestritoxin-Sf1c, U2-segestritoxin-Sf1d, U2-segestritoxin-Sf1e, U2-segestritoxin-Sf1f, U2-segestritoxin-Sf1g, U2-segestritoxin-Sf1h, U2-theraphotoxin-Hh1a, U3-cyrtautoxin-Asia, U3-plectoxin-Pt1a, U5-ctenitoxin-Pn1a, U7-ctenitoxin-Pk1a, β-hexatoxin-Mg1a, β-hexatoxin-Mr1a, Γ-ctenitoxin-Pn1a, 6-actinopoditoxin-Mb1a, δ-Amaurobitoxin-Pl1a, δ-Amaurobitoxin-Pl1b, 6-Amaurobitoxin-Pl1c, δ-Amaurobitoxin-Pl1d, δ-ctenitoxin-Asp2e, δ-ctenitoxin-Pn1a 1, 6-ctenitoxin-Pn1a 2, δ-ctenitoxin-Pn1b, δ-ctenitoxin-Pn2a, δ-ctenitoxin-Pn2b, δ-ctenitoxin-Pn2cδ-ctenitoxin-Pr2d, δ-hexatoxin-Aria, δ-hexatoxin-Hv1a, δ-hexatoxin-Hv1b, 6-hexatoxin-Iw1a, δ-hexatoxin-Mg1a, δ-hexatoxin-Mg1b, κ-hexatoxin-Hf1a, κ-hexatoxin-Hv1a, κ-hexatoxin-Hv1b, κ-hexatoxin-Hv1c_1, κ-hexatoxin-Hv1c_2, κ-hexatoxin-Hv1c_3, κ-hexatoxin-Hv1c_4, κ-hexatoxin-Hv1d, κ-hexatoxin-Hv1e, κ-theraphotoxin-Ec2a, κ-theraphotoxin-Ec2b, μ-agatoxin-Aa1a, μ-agatoxin-Aa1b, μ-agatoxin-Aa1c, μ-agatoxin-Aa1d, μ-agatoxin-Aa1e, μ-agatoxin-Aa1f, μ-agatoxin-Hc1a, μ-agatoxin-Hc1b, μ-agatoxin-Hc1c, μ-hexatoxin-Mg1a, μ-hexatoxin-Mg1b, μ-hexatoxin-Mg1c, μ-hexatoxin-Mg2a, μ-theraphotoxin-Hh1a, ω-actinopoditoxin-Mb1a, ω-agatoxin-Aa4a, ω-agatoxin-Aa4b, ω-agatoxin-Aa4c, ω-hexatoxin-Ar1a_1, ω-hexatoxin-Ar1a_3, ω-hexatoxin-Ar1b_1, ω-hexatoxin-Ar1d_1, ω-hexatoxin-Ar1d_4, ω-hexatoxin-Ar1e_1 ω-hexatoxin-Ar1f, ω-hexatoxin-Ar1g_1, ω-hexatoxin-Ar1h, ω-hexatoxin-Ar2a, ω-hexatoxin-Ar2b, ω-hexatoxin-Ar2c, ω-hexatoxin-Ar2d, ω-hexatoxin-Ar2e_1, ω-hexatoxin-Ar2e_2, ω-atracotoxin-Asp2a, ω-hexatoxin-Asp2b, ω-hexatoxin-Hf1a, ω-hexatoxin-Hi1a_1, ω-hexatoxin-Hi1a_2, ω-hexatoxin-Hi1a_3, ω-hexatoxin-Hi1b_1, ω-hexatoxin-Hi1b_10, ω-hexatoxin-Hi1b_2, ω-hexatoxin-Hi1b_5, ω-hexatoxin-Hi1b_8, ω-hexatoxin-Hi1c_1, ω-hexatoxin-Hi1c_2, ω-hexatoxin-Hv1a, ω-hexatoxin-Hv1b, ω-hexatoxin-Hv1c, ω-hexatoxin-Hv1d, ω-hexatoxin-Hv1e, ω-hexatoxin-Hv1f, ω-hexatoxin-Hv1g_1, ω-hexatoxin-Hv1g_5ω-hexatoxin-Hv1g_6ω-hexatoxin-Hv2a, ω-hexatoxin-Hv2b_1, ω-hexatoxin-Hv2b_2, ω-hexatoxin-Hv2b_3, ω-hexatoxin-Hv2b_4, ω-hexatoxin-Hv2b_5, ω-hexatoxin-Hv2b_6, ω-hexatoxin-Hv2b_7, ω-hexatoxin-Hv2c, ω-hexatoxin-Hv2d_1, ω-hexatoxin-Hv2d_2, ω-hexatoxin-Hv2d_3, ω-hexatoxin-Hv2e, ω-hexatoxin-Hv2f, ω-hexatoxin-Hv2g, ω-hexatoxin-Hv2h_1, ω-hexatoxin-Hv2h_2, ω-hexatoxin-Hv2i, ω-hexatoxin-Hv2j_1, ω-hexatoxin-Hv2j_2, ω-hexatoxin-Hv2k, ω-hexatoxin-Hv2l, ω-hexatoxin-Hv2m_1, ω-hexatoxin-Hv2m_2, ω-hexatoxin-Hv2m_3, ω-hexatoxin-Hv2n, ω-hexatoxin-Hv2o, ω-hexatoxin-Hvn1a, ω-hexatoxin-Hvn1b_1, ω-hexatoxin-Hvn1b_2, ω-hexatoxin-Hvn1b_3, ω-hexatoxin-Hvn1b_4, ω-hexatoxin-Hvn1b_6, ω-hexatoxin-Iw2a, ω-oxotoxin-Ol1b, ω-plectoxin-Pt1a, ω-theraphotoxin-Asp1a, ω-theraphotoxin-Asp1f, ω-theraphotoxin-Asp1g, ω-theraphotoxin-Ba1a, ω-theraphotoxin-Ba1b, ω-theraphotoxin-Bs1a, ω-theraphotoxin-Bs2a, or ω-theraphotoxin-Hh2a.

[0272] In some embodiments, a CRIP can be a spider toxin peptide or protein having an amino acid sequence as set forth in any one of SEQ ID NOs: 192-278 and 281-370.

[0273] In some embodiments, a polynucleotide encoding a CRIP can encode a CRIP having an amino acid sequence that is at least 50% identical, at least 55% identical, at least 60% identical, at least 65% identical, at least 70% identical, at least 75% identical, at least 80% identical, at least 81% identical, at least 82% identical, at least 83% identical, at least 84% identical, at least 85% identical, at least 86% identical, at least 87% identical, at least 88% identical, at least 89% identical, at least 90% identical, at least 91% identical, at least 92% identical, at least 93% identical, at least 94% identical, at least 95% identical, at least 96% identical, at least 97% identical, at least 98% identical, at least 99% identical, at least 99.5% identical, at least 99.6% identical, at least 99.7% identical, at least 99.8% identical, at least 99.9% identical, or 100% identical to an amino acid sequence set forth in SEQ ID NOs: 192-278 and 281-370.

[0274] ACTX Peptides

[0275] In some embodiments, a CRIP can be an ACTX peptide.

[0276] In some embodiments, a CRIP can be one or more of the following ACTX peptides: U-ACTX-Hv1a, U+2-ACTX-Hv1a, rU-ACTX-Hv1a, rU-ACTX-Hv1b, rκ-ACTX-Hv1c, ω-ACTX-Hv1a, and/or ω-ACTX-Hv1a+2.

[0277] Exemplary ACTX peptides include: U-ACTX-Hv1a, having the amino acid sequence “QYCVPVDQPCSLNTQPCCDDATCTQERNENGHTVYYCRA” (SEQ ID NO: 60); U+2-ACTX-Hv1a, having the amino acid sequence “GSQYCVPVDQPCSLNTQPCCDDATCTQERNENGHTVYYCRA” (SEQ ID NO: 61); Omega-ACTX-Hv1a, having the amino acid sequence “SPTCIPSGQPCPYNENCCSQSCTFKENENGNTVKRCD” (SEQ ID NO: 62); “ω+2-ACTX-Hv1a+2” (or Omega+2-ACTX-Hv1a) having the amino acid sequence “GSSPTCIPSGQPCPYNENCCSQSCTFKENENGNTVKRCD” (SEQ ID NO: 63); and Kappa+2-ACTX-Hv1a (or κ+2-ACTX-Hv1a), having the amino acid sequence “GSAICTGADRPCAACCPCCPGTSCKAESNGVSYCRKDEP” (SEQ ID NO: 64).

[0278] In some embodiments, a CRIP can be “Kappa-ACTX-Hv1a” (or κ+2-ACTX-Hv1a) having the amino acid sequence “AICTGADRPCAACCPCCPGTSCKAESNGVSYCRKDEP” (SEQ ID NO: 594).

[0279] In some embodiments, an ACTX peptide may comprise an amino acid sequence having at least 50%, at least 55%, at least 60%, at least 65%, at least 70%, at least 75%, at least 80%, at least 81%, at least 82%, at least 83%, at least 84%, at least 85%, at least 86%, at least 87%, at least 88%, at least 89%, at least 90%, at least 91%, at least 92%, at least 93%, at least 94%, at least 95%, at least 96%, at least 97%, at least 98%, at least 99%, at least 99.5%, at least 99.6%, at least 99.7%, at least 99.8%, at least 99.9%, or 100% amino acid sequence identity to SEQ ID NOs: 60-64, 192-370 and 594.

[0280] In some embodiments, a polynucleotide encoding an ACTX peptide can encode an ACTX peptide having an amino acid sequence that is at least 50% identical, at least 55% identical, at least 60% identical, at least 65% identical, at least 70% identical, at least 75% identical, at least 80% identical, at least 81% identical, at least 82% identical, at least 83% identical, at least 84% identical, at least 85% identical, at least 86% identical, at least 87% identical, at least 88% identical, at least 89% identical, at least 90% identical, at least 91% identical, at least 92% identical, at least 93% identical, at least 94% identical, at least 95% identical, at least 96% identical, at least 97% identical, at least 98% identical, at least 99% identical, at least 99.5% identical, at least 99.6% identical, at least 99.7% identical, at least 99.8% identical, at least 99.9% identical, or 100% identical to an amino acid sequence set forth in SEQ ID NOs: 60-64, and 594.

[0281] Γ-CNTX-Pn1a Peptides

[0282] In some preferred embodiments, a CRIP can be a Γ-CNTX-Pn1a or γ-CNTX-Pn1a toxin. The Γ-CNTX-Pn1a peptide is an insecticidal neurotoxin derived from the Brazilian armed spider, Phoneutria nigriventer. Γ-CNTX-Pn1a targets the N-methyl-D-aspartate (NMDA)-subtype of ionotropic glutamate receptor (GRIN), and sodium channels. An exemplary wild-type full length Γ-CNTX-Pn1a peptide has an amino acid sequence of: MKVAIVFLSLLVLAFASESIEENREEFPVEESARCADINGACKSDCDCCGDSVTCDCY WSDSCKCRESNFKIGMAIRKKFC (SEQ ID NO: 689) (NCBI Accession No. P59367). A recombinant mature Γ-CNTX-Pn1a peptide is provided, having an amino acid sequence of “GSCADINGACKSDCDCCGDSVTCDCYWSDSCKCRESNFKIGMAIRKKFC” (SEQ ID NO: 65).

[0283] In some embodiments, an Γ-CNTX-Pn1a peptide may comprise an amino acid sequence having at least 50%, at least 55%, at least 60%, at least 65%, at least 70%, at least 75%, at least 80%, at least 81%, at least 82%, at least 83%, at least 84%, at least 85%, at least 86%, at least 87%, at least 88%, at least 89%, at least 90%, at least 91%, at least 92%, at least 93%, at least 94%, at least 95%, at least 96%, at least 97%, at least 98%, at least 99%, at least 99.5%, at least 99.6%, at least 99.7%, at least 99.8%, at least 99.9%, or 100% amino acid sequence identity to SEQ ID NO: 65.

[0284] In some embodiments, a polynucleotide encoding a Γ-CNTX-Pn1a peptide can encode a Γ-CNTX-Pn1a peptide having an amino acid sequence that is at least 50% identical, at least 55% identical, at least 60% identical, at least 65% identical, at least 70% identical, at least 75% identical, at least 80% identical, at least 81% identical, at least 82% identical, at least 83% identical, at least 84% identical, at least 85% identical, at least 86% identical, at least 87% identical, at least 88% identical, at least 89% identical, at least 90% identical, at least 91% identical, at least 92% identical, at least 93% identical, at least 94% identical, at least 95% identical, at least 96% identical, at least 97% identical, at least 98% identical, at least 99% identical, at least 99.5% identical, at least 99.6% identical, at least 99.7% identical, at least 99.8% identical, at least 99.9% identical, or 100% identical to an amino acid sequence set forth in SEQ ID NOs: 65.

[0285] Wild-Type U1-Agatoxins and TVPs

[0286] “Hobo spiders” (Eratigena agrestis, formerly Tegenaria agrestis) are venomous spiders that are members of the Agelenidae family of spiders, or funnel web weavers. See Ingale A, Antigenic epitopes prediction and MEC binder of a paralytic insecticidal toxin (ITX-1) of Tegenaria agrestis (hobo spider). 4 Aug. 2010 Volume 2010:2 pp 97-103. The venom of Hobo spiders has been implicated as possessing insecticidal activity. See Johnson et al., Novel insecticidal peptides from Tegenaria agrestis spider venom may have a direct effect on the insect central nervous system. Arch Insect Biochem Physiol. 1998; 38(1):19-31; Klint et al., Production of Recombinant Disulfide-Rich Venom Peptides for Structural and Functional Analysis via Expression in the Periplasm of E. coli. PLoS One. 2013; 8(5): e63865.

[0287] The Hobo spider—along with several other spiders in the Agelenidae family, produce venom containing agatoxins—which exhibit insecticidal activity. Agatoxins are a chemically diverse group of toxins that can induce various insecticidal effects depending on the target species; e.g., agatoxins cause slow-onset spastic paralysis in coleopterans, lepidopterans, and dipterans; increase the rate of neuron firing in the central nervous system (CNS) of houseflies (Musca domestica); and are lethal to other insects (e.g., the blowfly, Lucilia cuprina). Accordingly, agatoxins are implicated in targeting the CNS. See Undheim et al., Weaponization of a hormone: convergent recruitment of hyperglycemic hormone into the venom of arthropod predators. Structure 23: 1283-1292, and Johnson et al., Novel insecticidal peptides from Tegenaria agrestis spider venom may have a direct effect on the insect central nervous system. Arch. Insect Biochem. Physiol. 38:19-31(1998).

[0288] Two types of agatoxins include U1-agatoxin-Ta1a and U1-agatoxin-Ta1b, which are both members of the helical arthropod-neuropeptide-derived (HAND) toxins family. In addition to spiders, these toxins can also be found in the venom of centipedes. The agatoxins are evolutionary offshoots of an ancient ecdysozoan hormone family, i.e., the ion transport peptide/crustacean hyperglycemic hormone (ITP/CHH) family. See Undheim et al., Weaponization of a hormone: convergent recruitment of hyperglycemic hormone into the venom of arthropod predators. Structure 23: 1283-1292, and Johnson et al., Novel insecticidal peptides from Tegenaria agrestis spider venom may have a direct effect on the insect central nervous system. Arch. Insect Biochem. Physiol. 38:19-31(1998).

[0289] The Hobo-spider-derived U1-agatoxin-Ta1b toxin has a full amino acid sequence of

“MKLQLMICLVLLPCFFCEPDEICRARMTNKEFTYKSNVCNNCGDQVAACEAECFRN DVYTACHEAQKG (SEQ ID NO:48)” which includes a signal peptide from amino acid positions 1-17, and the mature toxin from positions 18-68. Id. The protein comprises four tightly packed α-helices, with no β-strands present, and the molecular mass of the mature toxin is 5700.39 Daltons (Da). Id.

[0290] An exemplary mature wild-type U1-agatoxin-Ta1b polypeptide from Eratigena agrestis is provided having the amino acid sequence:

(SEQ ID NO: 1)
“EPDEICRARMTNKEFTYKSNVCNNCGDQVAACEAECFRNDVYTACHEA
QKG”.

[0291] During protein processing, the mature wild-type U1-agatoxin-Ta1b toxin undergoes an excision event of the C-terminal glycine, yielding the following amino acid sequence:

EPDEICRARMTNKEFTYKSNVCNNCGDQVAACEAECFRNDVYTACHEAQK (SEQ ID NO: 60). A subsequent post-translational event result in the mature wild-type U1-agatoxin-Ta1b toxin having a C-terminal amidation.

[0292] U1-agatoxin-Ta1b Variant Polypeptides (TVPs) are mutants or variants that differ from the wild-type U1-agatoxin-Ta1b (SEQ ID NO:1) in some way, e.g., in some embodiments, this variance can be an amino acid substitution, deletion, or addition; or a change to the polynucleotide encoding the wild-type U1-agatoxin-Ta1b resulting in an amino acid substitution, deletion, or addition. The result of this variation is a non-naturally occurring polypeptide and/or polynucleotide sequence encoding the same that possesses enhanced insecticidal activity against one or more insect species relative to the wild-type U1-agatoxin-Ta1b.

[0293] In some embodiments, a TVP can have an amino acid sequence according to SEQ ID NOs: 2-15, 49-53, 621-622, 624-628, 631-640, 642-651, or 653-654, as shown in Table 1.

TABLE 1
TVPs of the present invention.

| Amino | | | |
|---|---|---|---|
| Acid | | | |
| SEQ ID | | Amino Acid | |
| NO | Name | Sequence | Nucleotide Sequence |
| 1 | WT-Ta1b | EPDEICRARMTNKEF | GAACCAGACGAGATATGCAGAGCAAGGATGACC |
| | | TYKSNVCNNCGDQVA | AACAAAGAATTTACCTATAAGTCCAACGTATGC |
| | | ACEAECERNDVYTAC | AATAATTGTGGCGACCAGGTGGCAGCCTGCGAG |
| | | HEAQKG | GCAGAGTGCTTTCGTAATGACGTTTACACAGCT |
| | | | TGTCACGAGGCTCAGAAAGGT |
| 2 | TVP-R9Q | EPDEICRAQMTNKEF | GAACCAGACGAGATATGCAGAGCAcaaATGACC |
| | | TYKSNVCNNCGDQVA | AACAAAGAATTTACCTATAAGTCCAACGTATGC |
| | | ACEAECERNDVYTAC | AATAATTGTGGCGACCAGGTGGCAGCCTGCGAG |
| | | HEAQKG | GCAGAGTGCTTTCGTAATGACGTTTACACAGCT |
| | | | TGTCACGAGGCTCAGAAAGGT |
| 3 | TVP-R9QΔG | EPDEICRAQMTNKEF | GAACCAGACGAGATATGCAGAGCAcaaATGACC |
| | | TYKSNVCNNCGDQVA | AACAAAGAATTTACCTATAAGTCCAACGTATGC |
| | | ACEAECERNDVYTAC | AATAATTGTGGCGACCAGGTGGCAGCCTGCGAG |
| | | HEAQK | GCAGAGTGCTTTCGTAATGACGTTTACACAGCT |
| | | | TGTCACGAGGCTCAGAAA |
| 4 | TVP-K18A | EPDEICRARMTNKEF | GAACCAGACGAGATATGCAGAGCAAGGATGACC |
| | | TYASNVCNNCGDQVA | AACAAAGAATTTACCTATgctTCCAACGTATGC |
| | | ACEAECERNDVYTAC | AATAATTGTGGCGACCAGGTGGCAGCCTGCGAG |
| | | HEAQKG | GCAGAGTGCTTTCGTAATGACGTTTACACAGCT |
| | | | TGTCACGAGGCTCAGAAAGGT |
| 5 | TVP- | EPDEICRARMTNKEF | GAACCAGACGAGATATGCAGAGCAAGGATGACC |
| | K18AΔG | TYASNVCNNCGDQVA | AACAAAGAATTTACCTATgctTCCAACGTATGC |
| | | ACEAECERNDVYTAC | AATAATTGTGGCGACCAGGTGGCAGCCTGCGAG |
| | | HEAQK | GCAGAGTGCTTTCGTAATGACGTTTACACAGCT |
| | | | TGTCACGAGGCTCAGAAA |
| 6 | TVP-R38A | EPDEICRARMTNKEF | GAACCAGACGAGATATGCAGAGCAAGGATGACC |
| | | TYKSNVCNNCGDQVA | AACAAAGAATTTACCTATAAGTCCAACGTATGC |
| | | ACEAECFANDVYTAC | AATAATTGTGGCGACCAGGTGGCAGCCTGCGAG |
| | | HEAQKG | GCAGAGTGCTTTgctAATGACGTTTACACAGCT |
| | | | TGTCACGAGGCTCAGAAAGGT |
| 7 | TVP- | EPDEICRARMTNKEF | GAACCAGACGAGATATGCAGAGCAAGGATGACC |
| | R38AΔG | TYKSNVCNNCGDQVA | AACAAAGAATTTACCTATAAGTCCAACGTATGC |
| | | ACEAECFANDVYTAC | AATAATTGTGGCGACCAGGTGGCAGCCTGCGAG |
| | | HEAQK | GCAGAGTGCTTTgctAATGACGTTTACACAGCT |
| | | | TGTCACGAGGCTCAGAAA |
| 8 | TVP-A8N | EPDEICRNRMTNKEF | GAACCAGACGAGATATGCAGAaacAGGATGACC |
| | | TYKSNVCNNCGDQVA | AACAAAGAATTTACCTATAAGTCCAACGTATGC |
| | | ACEAECERNDVYTAC | AATAATTGTGGCGACCAGGTGGCAGCCTGCGAG |
| | | HEAQKG | GCAGAGTGCTTTCGTAATGACGTTTACACAGCT |
| | | | TGTCACGAGGCTCAGAAAGGT |
| 9 | TVP-A8NΔG | EPDEICRNRMTNKEF | GAACCAGACGAGATATGCAGAaacAGGATGACC |
| | | TYKSNVCNNCGDQVA | AACAAAGAATTTACCTATAAGTCCAACGTATGC |
| | | ACEAECERNDVYTAC | AATAATTGTGGCGACCAGGTGGCAGCCTGCGAG |
| | | HEAQK | GCAGAGTGCTTTCGTAATGACGTTTACACAGCT |
| | | | TGTCACGAGGCTCAGAAA |
| 10 | TVP-A8S | EPDEICRSRMTNKEF | GAACCAGACGAGATATGCAGAtcaAGGATGACC |
| | | TYKSNVCNNCGDQVA | AACAAAGAATTTACCTATAAGTCCAACGTATGC |
| | | ACEAECFRNDVYTAC | AATAATTGTGGCGACCAGGTGGCAGCCTGCGAG |
| | | HEAQKG | GCAGAGTGCTTTCGTAATGACGTTTACACAGCT |
| | | | TGTCACGAGGCTCAGAAAGGT |
| 11 | TVP-A8SΔG | EPDEICRSRMTNKEF | GAACCAGACGAGATATGCAGAtcaAGGATGACC |
| | | TYKSNVCNNCGDQVA | AACAAAGAATTTACCTATAAGTCCAACGTATGC |
| | | ACEAECERNDVYTAC | AATAATTGTGGCGACCAGGTGGCAGCCTGCGAG |
| | | HEAQK | GCAGAGTGCTTTCGTAATGACGTTTACACAGCT |
| | | | TGTCACGAGGCTCAGAAA |
| 12 | TVP-R9N | EPDEICRANMTNKEF | GAACCAGACGAGATATGCAGAGCAaacATGACC |
| | | TYKSNVCNNCGDQVA | AACAAAGAATTTACCTATAAGTCCAACGTATGC |
| | | ACEAECFRNDVYTAC | AATAATTGTGGCGACCAGGTGGCAGCCTGCGAG |
| | | HEAQKG | GCAGAGTGCTTTCGTAATGACGTTTACACAGCT |
| | | | TGTCACGAGGCTCAGAAAGGT |
| 13 | TVP-R9NΔG | EPDEICRANMTNKEF | GAACCAGACGAGATATGCAGAGCAaacATGACC |
| | | TYKSNVCNNCGDQVA | AACAAAGAATTTACCTATAAGTCCAACGTATGC |
| | | ACEAECERNDVYTAC | AATAATTGTGGCGACCAGGTGGCAGCCTGCGAG |
| | | HEAQK | GCAGAGTGCTTTCGTAATGACGTTTACACAGCT |
| | | | TGTCACGAGGCTCAGAAA |
| 14 | TVP-T11P | EPDEICRARMPNKEF | GAACCAGACGAGATATGCAGAGCAAGGATGcct |
| | | TYKSNVCNNCGDQVA | AACAAAGAATTTACCTATAAGTCCAACGTATGC |
| | | ACEAECERNDVYTAC | AATAATTGTGGCGACCAGGTGGCAGCCTGCGAG |
| | | HEAQKG | GCAGAGTGCTTTCGTAATGACGTTTACACAGCT |
| | | | TGTCACGAGGCTCAGAAAGGT |
| 15 | TVP- | EPDEICRARMPNKEF | GAACCAGACGAGATATGCAGAGCAAGGATGcct |
| | T11PΔG | TYKSNVCNNCGDQVA | AACAAAGAATTTACCTATAAGTCCAACGTATGC |
| | | ACEAECERNDVYTAC | AATAATTGTGGCGACCAGGTGGCAGCCTGCGAG |
| | | HEAQK | GCAGAGTGCTTTCGTAATGACGTTTACACAGCT |
| | | | TGTCACGAGGCTCAGAAA |
| 49 | TVP-T43A | EPDEICRARMTNKEF | GAACCAGACGAGATATGCAGAGCAAGGATGACC |
| | | TYKSNVCNNCGDQVA | AACAAAGAATTTACCTATAAGTCCAACGTATGC |
| | | ACEAECERNDVYAAC | AATAATTGTGGCGACCAGGTGGCAGCCTGCGAG |
| | | HEAQKG | GCAGAGTGCTTTCGTAATGACGTTTACgctGCT |
| | | | TGTCACGAGGCTCAGAAAGGT |
| 50 | TVP- | EPDEICRARMTNKEF | GAACCAGACGAGATATGCAGAGCAAGGATGACC |
| | T43AΔG | TYKSNVCNNCGDQVA | AACAAAGAATTTACCTATAAGTCCAACGTATGC |
| | | ACEAECERNDVYAAC | AATAATTGTGGCGACCAGGTGGCAGCCTGCGAG |
| | | HEAQK | GCAGAGTGCTTTCGTAATGACGTTTACgctGCT |
| | | | TGTCACGAGGCTCAGAAA |
| 51 | TVP- | EPDEICRAQMTNKEF | GAACCAGACGAGATATGCAGAGCAcaaATGACC |
| | R9Q/T43A | TYKSNVCNNCGDQVA | AACAAAGAATTTACCTATAAGTCCAACGTATGC |
| | | ACEAECFRNDVYAAC | AATAATTGTGGCGACCAGGTGGCAGCCTGCGAG |
| | | HEAQKG | GCAGAGTGCTTTCGTAATGACGTTTACgctGCT |
| | | | TGTCACGAGGCTCAGAAAGGT |
| 52 | TVP- | EPDEICRAQMTNKEF | GAACCAGACGAGATATGCAGAGCAcaaATGACC |
| | R9Q/T43A/ | TYKSNVCNNCGDQVA | AACAAAGAATTTACCTATAAGTCCAACGTATGC |
| | ΔG | ACEAECFRNDVYAAC | AATAATTGTGGCGACCAGGTGGCAGCCTGCGAG |
| | | HEAQK | GCAGAGTGCTTTCGTAATGACGTTTACgctGCT |
| | | | TGTCACGAGGCTCAGAAA |
| 53 | TVP- | EPDEICRAQMTNKEF | GAACCAGACGAGATATGCAGAGCAcaaATGACC |
| | R9Q/T43A/ | TYKSNVCNNCGDQVA | AACAAAGAATTTACCTATAAGTCCAACGTATGC |
| | ΔK-G | ACEAECERNDVYAAC | AATAATTGTGGCGACCAGGTGGCAGCCTGCGAG |
| | | HEAQ | GCAGAGTGCTTTCGTAATGACGTTTACgctGCT |
| | | | TGTCACGAGGCTCAG |
| 621 | TVP-R9A | EPDEICRAAMTNKEF | GAACCAGACGAGATATGCAGAGCAgcaATGACC |
| | | TYKSNVCNNCGDQVA | AACAAAGAATTTACCTATAAGTCCAACGTATGC |
| | | ACEAECERNDVYTAC | AATAATTGTGGCGACCAGGTGGCAGCCTGCGAG |
| | | HEAQKG | GCAGAGTGCTTTCGTAATGACGTTTACACAGCT |
| | | | TGTCACGAGGCTCAGAAAGGT |
| 622 | TVP-R9G | EPDEICRAGMTNKEF | GAACCAGACGAGATATGCAGAGCAggaATGACC |
| | | TYKSNVCNNCGDQVA | AACAAAGAATTTACCTATAAGTCCAACGTATGC |
| | | ACEAECERNDVYTAC | AATAATTGTGGCGACCAGGTGGCAGCCTGCGAG |
| | | HEAQKG | GCAGAGTGCTTTCGTAATGACGTTTACACAGCT |
| | | | TGTCACGAGGCTCAGAAAGGT |
| 623 | TVP-R9N | EPDEICRANMTNKEF | GAACCAGACGAGATATGCAGAGCAaatATGACC |
| | | TYKSNVCNNCGDQVA | AACAAAGAATTTACCTATAAGTCCAACGTATGC |
| | | ACEAECERNDVYTAC | AATAATTGTGGCGACCAGGTGGCAGCCTGCGAG |
| | | HEAQKG | GCAGAGTGCTTTCGTAATGACGTTTACACAGCT |
| | | | TGTCACGAGGCTCAGAAAGGT |
| 624 | TVP-R9L | EPDEICRALMTNKEF | GAACCAGACGAGATATGCAGAGCActaATGACC |
| | | TYKSNVCNNCGDQVA | AACAAAGAATTTACCTATAAGTCCAACGTATGC |
| | | ACEAECFRNDVYTAC | AATAATTGTGGCGACCAGGTGGCAGCCTGCGAG |
| | | HEAQKG | GCAGAGTGCTTTCGTAATGACGTTTACACAGCT |
| | | | TGTCACGAGGCTCAGAAAGGT |
| 625 | TVP-R9D | EPDEICRADMTNKEF | GAACCAGACGAGATATGCAGAGCAgatATGACC |
| | | TYKSNVCNNCGDQVA | AACAAAGAATTTACCTATAAGTCCAACGTATGC |
| | | ACEAECERNDVYTAC | AATAATTGTGGCGACCAGGTGGCAGCCTGCGAG |
| | | HEAQKG | GCAGAGTGCTTTCGTAATGACGTTTACACAGCT |
| | | | TGTCACGAGGCTCAGAAAGGT |
| 626 | TVP-R9V | EPDEICRAVMTNKEF | GAACCAGACGAGATATGCAGAGCAgtcATGACC |
| | | TYKSNVCNNCGDQVA | AACAAAGAATTTACCTATAAGTCCAACGTATGC |
| | | ACEAECFRNDVYTAC | AATAATTGTGGCGACCAGGTGGCAGCCTGCGAG |
| | | HEAQKG | GCAGAGTGCTTTCGTAATGACGTTTACACAGCT |
| | | | TGTCACGAGGCTCAGAAAGGT |
| 627 | TVP-R9M | EPDEICRAMMTNKEF | GAACCAGACGAGATATGCAGAGCAatgATGACC |
| | | TYKSNVCNNCGDQVA | AACAAAGAATTTACCTATAAGTCCAACGTATGC |
| | | ACEAECFRNDVYTAC | AATAATTGTGGCGACCAGGTGGCAGCCTGCGAG |
| | | HEAQKG | GCAGAGTGCTTTCGTAATGACGTTTACACAGCT |
| | | | TGTCACGAGGCTCAGAAAGGT |
| 628 | TVP-R9I | EPDEICRAIMTNKEF | GAACCAGACGAGATATGCAGAGCAattATGACC |
| | | TYKSNVCNNCGDQVA | AACAAAGAATTTACCTATAAGTCCAACGTATGC |
| | | ACEAECERNDVYTAC | AATAATTGTGGCGACCAGGTGGCAGCCTGCGAG |
| | | HEAQKG | GCAGAGTGCTTTCGTAATGACGTTTACACAGCT |
| | | | TGTCACGAGGCTCAGAAAGGT |
| 629 | TVP-R9Q/ | EPDEICRAQMTNKEF | GAACCAGACGAGATATGCAGAGCAcaaATGACC |
| | T43A | TYKSNVCNNCGDQVA | AACAAAGAATTTACCTATAAGTCCAACGTATGC |
| | | ACEAECFRNDVYAAC | AATAATTGTGGCGACCAGGTGGCAGCCTGCGAG |
| | | HEAQKG | GCAGAGTGCTTTCGTAATGACGTTTACgcaGCT |
| | | | TGTCACGAGGCTCAGAAAGGT |
| 630 | TVP-R9Q | EPDEICRAQMTNKEF | GAACCAGACGAGATATGCAGAGCAcaaATGACC |
| | | TYKSNVCNNCGDQVA | AACAAAGAATTTACCTATAAGTCCAACGTATGC |
| | | ACEAECERNDVYTAC | AATAATTGTGGCGACCAGGTGGCAGCCTGCGAG |
| | | HEAQKG | GCAGAGTGCTTTCGTAATGACGTTTACACAGCT |
| | | | TGTCACGAGGCTCAGAAAGGT |
| 631 | TVP-R9C | EPDEICRACMTNKEF | GAACCAGACGAGATATGCAGAGCAtctATGACC |
| | | TYKSNVCNNCGDQVA | AACAAAGAATTTACCTATAAGTCCAACGTATGC |
| | | ACEAECFRNDVYTAC | AATAATTGTGGCGACCAGGTGGCAGCCTGCGAG |
| | | HEAQKG | GCAGAGTGCTTTCGTAATGACGTTTACACAGCT |
| | | | TGTCACGAGGCTCAGAAAGGT |
| 632 | TVP-R9E | EPDEICRAEMTNKEF | GAACCAGACGAGATATGCAGAGCAgaaATGACC |
| | | TYKSNVCNNCGDQVA | AACAAAGAATTTACCTATAAGTCCAACGTATGC |
| | | ACEAECFRNDVYTAC | AATAATTGTGGCGACCAGGTGGCAGCCTGCGAG |
| | | HEAQKG | GCAGAGTGCTTTCGTAATGACGTTTACACAGCT |
| | | | TGTCACGAGGCTCAGAAAGGT |
| 633 | TVP-R9T | EPDEICRATMTNKEF | GAACCAGACGAGATATGCAGAGCAactATGACC |
| | | TYKSNVCNNCGDQVA | AACAAAGAATTTACCTATAAGTCCAACGTATGC |
| | | ACEAECFRNDVYTAC | AATAATTGTGGCGACCAGGTGGCAGCCTGCGAG |
| | | HEAQKG | GCAGAGTGCTTTCGTAATGACGTTTACACAGCT |
| | | | TGTCACGAGGCTCAGAAAGGT |
| 634 | TVP-R9S | EPDEICRASMINKEF | GAACCAGACGAGATATGCAGAGCAtctATGACC |
| | | TYKSNVCNNCGDQVA | AACAAAGAATTTACCTATAAGTCCAACGTATGC |
| | | ACEAECERNDVYTAC | AATAATTGTGGCGACCAGGTGGCAGCCTGCGAG |
| | | HEAQKG | GCAGAGTGCTTTCGTAATGACGTTTACACAGCT |
| | | | TGTCACGAGGCTCAGAAAGGT |
| 635 | TVP-T43F | EPDEICRARMTNKEF | GAACCAGACGAGATATGCAGAGCAAGGATGACC |
| | | TYKSNVCNNCGDQVA | AACAAAGAATTTACCTATAAGTCCAACGTATGC |
| | | ACEAECERNDVYFAC | AATAATTGTGGCGACCAGGTGGCAGCCTGCGAG |
| | | HEAQKG | GCAGAGTGCTTTCGTAATGACGTTTACtttGCT |
| | | | TGTCACGAGGCTCAGAAAGGT |
| 636 | TVP-T43P | EPDEICRARMTNKEF | GAACCAGACGAGATATGCAGAGCAAGGATGACC |
| | | TYKSNVCNNCGDQVA | AACAAAGAATTTACCTATAAGTCCAACGTATGC |
| | | ACEAECFRNDVYPAC | AATAATTGTGGCGACCAGGTGGCAGCCTGCGAG |
| | | HEAQKG | GCAGAGTGCTTTCGTAATGACGTTTACcctGCT |
| | | | TGTCACGAGGCTCAGAAAGGT |
| 637 | TVP-T43Y | EPDEICRARMTNKEF | GAACCAGACGAGATATGCAGAGCAAGGATGACC |
| | | TYKSNVCNNCGDQVA | AACAAAGAATTTACCTATAAGTCCAACGTATGC |
| | | ACEAECERNDVYYAC | AATAATTGTGGCGACCAGGTGGCAGCCTGCGAG |
| | | HEAQKG | GCAGAGTGCTTTCGTAATGACGTTTACtatGCT |
| | | | TGTCACGAGGCTCAGAAAGGT |
| 638 | TVP-T43K | EPDEICRARMTNKEF | GAACCAGACGAGATATGCAGAGCAAGGATGACC |
| | | TYKSNVCNNCGDQVA | AACAAAGAATTTACCTATAAGTCCAACGTATGC |
| | | ACEAECFRNDVYKAC | AATAATTGTGGCGACCAGGTGGCAGCCTGCGAG |
| | | HEAQKG | GCAGAGTGCTTTCGTAATGACGTTTACaaaGCT |
| | | | TGTCACGAGGCTCAGAAAGGT |
| 639 | TVP-T43W | EPDEICRARMTNKEF | GAACCAGACGAGATATGCAGAGCAAGGATGACC |
| | | TYKSNVCNNCGDQVA | AACAAAGAATTTACCTATAAGTCCAACGTATGC |
| | | ACEAECERNDVYWAC | AATAATTGTGGCGACCAGGTGGCAGCCTGCGAG |
| | | HEAQKG | GCAGAGTGCTTTCGTAATGACGTTTACtggGCT |
| | | | TGTCACGAGGCTCAGAAAGGT |
| 640 | TVP-T43H | EPDEICRARMTNKEF | GAACCAGACGAGATATGCAGAGCAAGGATGACC |
| | | TYKSNVCNNCGDQVA | AACAAAGAATTTACCTATAAGTCCAACGTATGC |
| | | ACEAECERNDVYHAC | AATAATTGTGGCGACCAGGTGGCAGCCTGCGAG |
| | | HEAQKG | GCAGAGTGCTTTCGTAATGACGTTTACcatGCT |
| | | | TGTCACGAGGCTCAGAAAGGT |
| 641 | TVP-T43A | EPDEICRARMTNKEF | GAACCAGACGAGATATGCAGAGCAAGGATGACC |
| | | TYKSNVCNNCGDQVA | AACAAAGAATTTACCTATAAGTCCAACGTATGC |
| | | ACEAECFRNDVYAAC | AATAATTGTGGCGACCAGGTGGCAGCCTGCGAG |
| | | HEAQKG | GCAGAGTGCTTTCGTAATGACGTTTACgctGCT |
| | | | TGTCACGAGGCTCAGAAAGGT |
| 642 | TVP-T43G | EPDEICRARMTNKEF | GAACCAGACGAGATATGCAGAGCAAGGATGACC |
| | | TYKSNVCNNCGDQVA | AACAAAGAATTTACCTATAAGTCCAACGTATGC |
| | | ACEAECFRNDVYGAC | AATAATTGTGGCGACCAGGTGGCAGCCTGCGAG |
| | | HEAQKG | GCAGAGTGCTTTCGTAATGACGTTTACggtGCT |
| | | | TGTCACGAGGCTCAGAAAGGT |
| 643 | TVP-T43N | EPDEICRARMTNKEF | GAACCAGACGAGATATGCAGAGCAAGGATGACC |
| | | TYKSNVCNNCGDQVA | AACAAAGAATTTACCTATAAGTCCAACGTATGC |
| | | ACEAECERNDVYNAC | AATAATTGTGGCGACCAGGTGGCAGCCTGCGAG |
| | | HEAQKG | GCAGAGTGCTTTCGTAATGACGTTTACaatGCT |
| | | | TGTCACGAGGCTCAGAAAGGT |
| 644 | TVP-T43L | EPDEICRARMTNKEF | GAACCAGACGAGATATGCAGAGCAAGGATGACC |
| | | TYKSNVCNNCGDQVA | AACAAAGAATTTACCTATAAGTCCAACGTATGC |
| | | ACEAECFRNDVYLAC | AATAATTGTGGCGACCAGGTGGCAGCCTGCGAG |
| | | HEAQKG | GCAGAGTGCTTTCGTAATGACGTTTACttaGCT |
| | | | TGTCACGAGGCTCAGAAAGGT |
| 645 | TVP-T43D | EPDEICRARMTNKEF | GAACCAGACGAGATATGCAGAGCAAGGATGACC |
| | | TYKSNVCNNCGDQVA | AACAAAGAATTTACCTATAAGTCCAACGTATGC |
| | | ACEAECERNDVYDAC | AATAATTGTGGCGACCAGGTGGCAGCCTGCGAG |
| | | HEAQKG | GCAGAGTGCTTTCGTAATGACGTTTACgatGCT |
| | | | TGTCACGAGGCTCAGAAAGGT |
| 646 | TVP-T43V | EPDEICRARMTNKEF | GAACCAGACGAGATATGCAGAGCAAGGATGACC |
| | | TYKSNVCNNCGDQVA | AACAAAGAATTTACCTATAAGTCCAACGTATGC |
| | | ACEAECFRNDVYVAC | AATAATTGTGGCGACCAGGTGGCAGCCTGCGAG |
| | | HEAQKG | GCAGAGTGCTTTCGTAATGACGTTTACgtcGCT |
| | | | TGTCACGAGGCTCAGAAAGGT |
| 647 | TVP-T43M | EPDEICRARMTNKEF | GAACCAGACGAGATATGCAGAGCAAGGATGACC |
| | | TYKSNVCNNCGDQVA | AACAAAGAATTTACCTATAAGTCCAACGTATGC |
| | | ACEAECERNDVYMAC | AATAATTGTGGCGACCAGGTGGCAGCCTGCGAG |
| | | HEAQKG | GCAGAGTGCTTTCGTAATGACGTTTACatgGCT |
| | | | TGTCACGAGGCTCAGAAAGGT |
| 648 | TVP-T43I | EPDEICRARMTNKEF | GAACCAGACGAGATATGCAGAGCAAGGATGACC |
| | | TYKSNVCNNCGDQVA | AACAAAGAATTTACCTATAAGTCCAACGTATGC |
| | | ACEAECERNDVYIAC | AATAATTGTGGCGACCAGGTGGCAGCCTGCGAG |
| | | HEAQKG | GCAGAGTGCTTTCGTAATGACGTTTACattGCT |
| | | | TGTCACGAGGCTCAGAAAGGT |
| 649 | TVP-T43Q | EPDEICRARMTNKEF | GAACCAGACGAGATATGCAGAGCAAGGATGACC |
| | | TYKSNVCNNCGDQVA | AACAAAGAATTTACCTATAAGTCCAACGTATGC |
| | | ACEAECFRNDVYQAC | AATAATTGTGGCGACCAGGTGGCAGCCTGCGAG |
| | | HEAQKG | GCAGAGTGCTTTCGTAATGACGTTTACcaaGCT |
| | | | TGTCACGAGGCTCAGAAAGGT |
| 650 | TVP-T43C | EPDEICRARMTNKEF | GAACCAGACGAGATATGCAGAGCAAGGATGACC |
| | | TYKSNVCNNCGDQVA | AACAAAGAATTTACCTATAAGTCCAACGTATGC |
| | | ACEAECERNDVYCAC | AATAATTGTGGCGACCAGGTGGCAGCCTGCGAG |
| | | HEAQKG | GCAGAGTGCTTTCGTAATGACGTTTACtctGCT |
| | | | TGTCACGAGGCTCAGAAAGGT |
| 651 | TVP-T43E | EPDEICRARMTNKEF | GAACCAGACGAGATATGCAGAGCAAGGATGACC |
| | | TYKSNVCNNCGDQVA | AACAAAGAATTTACCTATAAGTCCAACGTATGC |
| | | ACEAECFRNDVYEAC | AATAATTGTGGCGACCAGGTGGCAGCCTGCGAG |
| | | HEAQKG | GCAGAGTGCTTTCGTAATGACGTTTACgaaGCT |
| | | | TGTCACGAGGCTCAGAAAGGT |
| 652 | TVP-T43T | EPDEICRARMTNKEF | GAACCAGACGAGATATGCAGAGCAAGGATGACC |
| | | TYKSNVCNNCGDQVA | AACAAAGAATTTACCTATAAGTCCAACGTATGC |
| | | ACEAECERNDVYTAC | AATAATTGTGGCGACCAGGTGGCAGCCTGCGAG |
| | | HEAQKG | GCAGAGTGCTTTCGTAATGACGTTTACACAGCT |
| | | | TGTCACGAGGCTCAGAAAGGT |
| 653 | TVP-T43S | EPDEICRARMTNKEF | GAACCAGACGAGATATGCAGAGCAAGGATGACC |
| | | TYKSNVCNNCGDQVA | AACAAAGAATTTACCTATAAGTCCAACGTATGC |
| | | ACEAECERNDVYSAC | AATAATTGTGGCGACCAGGTGGCAGCCTGCGAG |
| | | HEAQKG | GCAGAGTGCTTTCGTAATGACGTTTACtcaGCT |
| | | | TGTCACGAGGCTCAGAAAGGT |
| 654 | TVP-T43R | EPDEICRARMTNKEF | GAACCAGACGAGATATGCAGAGCAAGGATGACC |
| | | TYKSNVCNNCGDQVA | AACAAAGAATTTACCTATAAGTCCAACGTATGC |
| | | ACEAECERNDVYRAC | AATAATTGTGGCGACCAGGTGGCAGCCTGCGAG |
| | | HEAQKG | GCAGAGTGCTTTCGTAATGACGTTTACagaGCT |
| | | | TGTCACGAGGCTCAGAAAGGT |

[0294] In some embodiments, a polynucleotide sequence having a sequence according to SEQ ID NOs: 2-15, 49-53, 621-622, 624-628, 631-640, 642-651, or 653-654, is operable to encode a TVP. For example, in some embodiments, a polynucleotide as shown in Table 2 is operable to encode a TVP.

TABLE 2
Polynucleotides of the present invention.

| Polynucleotide | | |
|---|---|---|
| SEQ ID NO | Name | Sequence |
| 16 | WT-Ta1b | GAACCAGACGAGATATGCAGAGCAAGGATGACCAACAAAGA |
| | | ATTTACCTATAAGTCCAACGTATGCAATAATTGTGGCGACC |
| | | AGGTGGCAGCCTGCGAGGCAGAGTGCTTTCGTAATGACGTT |
| | | TACACAGCTTGTCACGAGGCTCAGAAAGGT |
| 17 | TVP-R9Q | GAACCAGACGAGATATGCAGAGCAcaaATGACCAACAAAGA |
| | | ATTTACCTATAAGTCCAACGTATGCAATAATTGTGGCGACC |
| | | AGGTGGCAGCCTGCGAGGCAGAGTGCTTTCGTAATGACGTT |
| | | TACACAGCTTGTCACGAGGCTCAGAAAGGT |
| 18 | TVP-R9QΔG | GAACCAGACGAGATATGCAGAGCAcaaATGACCAACAAAGA |
| | | ATTTACCTATAAGTCCAACGTATGCAATAATTGTGGCGACC |
| | | AGGTGGCAGCCTGCGAGGCAGAGTGCTTTCGTAATGACGTT |
| | | TACACAGCTTGTCACGAGGCTCAGAAA |
| 19 | TVP-K18A | GAACCAGACGAGATATGCAGAGCAAGGATGACCAACAAAGA |
| | | ATTTACCTATgctTCCAACGTATGCAATAATTGTGGCGACC |
| | | AGGTGGCAGCCTGCGAGGCAGAGTGCTTTCGTAATGACGTT |
| | | TACACAGCTTGTCACGAGGCTCAGAAAGGT |
| 20 | TVP-K18AΔG | GAACCAGACGAGATATGCAGAGCAAGGATGACCAACAAAGA |
| | | ATTTACCTATgctTCCAACGTATGCAATAATTGTGGCGACC |
| | | AGGTGGCAGCCTGCGAGGCAGAGTGCTTTCGTAATGACGTT |
| | | TACACAGCTTGTCACGAGGCTCAGAAA |
| 21 | TVP-R38A | GAACCAGACGAGATATGCAGAGCAAGGATGACCAACAAAGA |
| | | ATTTACCTATAAGTCCAACGTATGCAATAATTGTGGCGACC |
| | | AGGTGGCAGCCTGCGAGGCAGAGTGCTTTgctAATGACGTT |
| | | TACACAGCTTGTCACGAGGCTCAGAAAGGT |
| 22 | TVP-R38AΔG | GAACCAGACGAGATATGCAGAGCAAGGATGACCAACAAAGA |
| | | ATTTACCTATAAGTCCAACGTATGCAATAATTGTGGCGACC |
| | | AGGTGGCAGCCTGCGAGGCAGAGTGCTTTgctAATGACGTT |
| | | TACACAGCTTGTCACGAGGCTCAGAAA |
| 23 | TVP-A8N | GAACCAGACGAGATATGCAGAaacAGGATGACCAACAAAGA |
| | | ATTTACCTATAAGTCCAACGTATGCAATAATTGTGGCGACC |
| | | AGGTGGCAGCCTGCGAGGCAGAGTGCTTTCGTAATGACGTT |
| | | TACACAGCTTGTCACGAGGCTCAGAAAGGT |
| 24 | TVP-A8NΔG | GAACCAGACGAGATATGCAGAaacAGGATGACCAACAAAGA |
| | | ATTTACCTATAAGTCCAACGTATGCAATAATTGTGGCGACC |
| | | AGGTGGCAGCCTGCGAGGCAGAGTGCTTTCGTAATGACGTT |
| | | TACACAGCTTGTCACGAGGCTCAGAAA |
| 25 | TVP-A8S | GAACCAGACGAGATATGCAGAtcaAGGATGACCAACAAAGA |
| | | ATTTACCTATAAGTCCAACGTATGCAATAATTGTGGCGACC |
| | | AGGTGGCAGCCTGCGAGGCAGAGTGCTTTCGTAATGACGTT |
| | | TACACAGCTTGTCACGAGGCTCAGAAAGGT |
| 26 | TVP-A8SΔG | GAACCAGACGAGATATGCAGAtcaAGGATGACCAACAAAGA |
| | | ATTTACCTATAAGTCCAACGTATGCAATAATTGTGGCGACC |
| | | AGGTGGCAGCCTGCGAGGCAGAGTGCTTTCGTAATGACGTT |
| | | TACACAGCTTGTCACGAGGCTCAGAAA |
| 27 | TVP-R9N | GAACCAGACGAGATATGCAGAGCAaacATGACCAACAAAGA |
| | | ATTTACCTATAAGTCCAACGTATGCAATAATTGTGGCGACC |
| | | AGGTGGCAGCCTGCGAGGCAGAGTGCTTTCGTAATGACGTT |
| | | TACACAGCTTGTCACGAGGCTCAGAAAGGT |
| 28 | TVP-R9NΔG | GAACCAGACGAGATATGCAGAGCAaacATGACCAACAAAGA |
| | | ATTTACCTATAAGTCCAACGTATGCAATAATTGTGGCGACC |
| | | AGGTGGCAGCCTGCGAGGCAGAGTGCTTTCGTAATGACGTT |
| | | TACACAGCTTGTCACGAGGCTCAGAAA |
| 29 | TVP-T11P | GAACCAGACGAGATATGCAGAGCAAGGATGcctAACAAAGA |
| | | ATTTACCTATAAGTCCAACGTATGCAATAATTGTGGCGACC |
| | | AGGTGGCAGCCTGCGAGGCAGAGTGCTTTCGTAATGACGTT |
| | | TACACAGCTTGTCACGAGGCTCAGAAAGGT |
| 30 | TVP-T11PΔG | GAACCAGACGAGATATGCAGAGCAAGGATGcctAACAAAGA |
| | | ATTTACCTATAAGTCCAACGTATGCAATAATTGTGGCGACC |
| | | AGGTGGCAGCCTGCGAGGCAGAGTGCTTTCGTAATGACGTT |
| | | TACACAGCTTGTCACGAGGCTCAGAAA |
| 54 | TVP-T43A | GAACCAGACGAGATATGCAGAGCAAGGATGACCAACAAAGA |
| | | ATTTACCTATAAGTCCAACGTATGCAATAATTGTGGCGACC |
| | | AGGTGGCAGCCTGCGAGGCAGAGTGCTTTCGTAATGACGTT |
| | | TACgctGCTTGTCACGAGGCTCAGAAAGGT |
| 55 | TVP-T43AΔG | GAACCAGACGAGATATGCAGAGCAAGGATGACCAACAAAGA |
| | | ATTTACCTATAAGTCCAACGTATGCAATAATTGTGGCGACC |
| | | AGGTGGCAGCCTGCGAGGCAGAGTGCTTTCGTAATGACGTT |
| | | TACgctGCTTGTCACGAGGCTCAGAAA |
| 56 | TVP-R9Q/T43A | GAACCAGACGAGATATGCAGAGCAcaaATGACCAACAAAGA |
| | | ATTTACCTATAAGTCCAACGTATGCAATAATTGTGGCGACC |
| | | AGGTGGCAGCCTGCGAGGCAGAGTGCTTTCGTAATGACGTT |
| | | TACgctGCTTGTCACGAGGCTCAGAAAGGT |
| 57 | TVP-R9Q/T43A/ | GAACCAGACGAGATATGCAGAGCAcaaATGACCAACAAAGA |
| | ΔG | ATTTACCTATAAGTCCAACGTATGCAATAATTGTGGCGACC |
| | | AGGTGGCAGCCTGCGAGGCAGAGTGCTTTCGTAATGACGTT |
| | | TACgctGCTTGTCACGAGGCTCAGAAA |
| 58 | TVP- | GAACCAGACGAGATATGCAGAGCAcaaATGACCAACAAAGA |
| | R9Q/T43A/ΔK-G | ATTTACCTATAAGTCCAACGTATGCAATAATTGTGGCGACC |
| | | AGGTGGCAGCCTGCGAGGCAGAGTGCTTTCGTAATGACGTT |
| | | TACgctGCTTGTCACGAGGCTCAG |
| 655 | TVP-R9A | GAACCAGACGAGATATGCAGAGCAgcaATGACCAACAAAGA |
| | | ATTTACCTATAAGTCCAACGTATGCAATAATTGTGGCGACC |
| | | AGGTGGCAGCCTGCGAGGCAGAGTGCTTTCGTAATGACGTT |
| | | TACACAGCTTGTCACGAGGCTCAGAAAGGT |
| 656 | TVP-R9G | GAACCAGACGAGATATGCAGAGCAggaATGACCAACAAAGA |
| | | ATTTACCTATAAGTCCAACGTATGCAATAATTGTGGCGACC |
| | | AGGTGGCAGCCTGCGAGGCAGAGTGCTTTCGTAATGACGTT |
| | | TACACAGCTTGTCACGAGGCTCAGAAAGGT |
| 657 | TVP-R9N | GAACCAGACGAGATATGCAGAGCAaatATGACCAACAAAGA |
| | | ATTTACCTATAAGTCCAACGTATGCAATAATTGTGGCGACC |
| | | AGGTGGCAGCCTGCGAGGCAGAGTGCTTTCGTAATGACGTT |
| | | TACACAGCTTGTCACGAGGCTCAGAAAGGT |
| 658 | TVP-R9L | GAACCAGACGAGATATGCAGAGCActaATGACCAACAAAGA |
| | | ATTTACCTATAAGTCCAACGTATGCAATAATTGTGGCGACC |
| | | AGGTGGCAGCCTGCGAGGCAGAGTGCTTTCGTAATGACGTT |
| | | TACACAGCTTGTCACGAGGCTCAGAAAGGT |
| 659 | TVP-R9D | GAACCAGACGAGATATGCAGAGCAgatATGACCAACAAAGA |
| | | ATTTACCTATAAGTCCAACGTATGCAATAATTGTGGCGACC |
| | | AGGTGGCAGCCTGCGAGGCAGAGTGCTTTCGTAATGACGTT |
| | | TACACAGCTTGTCACGAGGCTCAGAAAGGT |
| 660 | TVP-R9V | GAACCAGACGAGATATGCAGAGCAgtcATGACCAACAAAGA |
| | | ATTTACCTATAAGTCCAACGTATGCAATAATTGTGGCGACC |
| | | AGGTGGCAGCCTGCGAGGCAGAGTGCTTTCGTAATGACGTT |
| | | TACACAGCTTGTCACGAGGCTCAGAAAGGT |
| 661 | TVP-R9M | GAACCAGACGAGATATGCAGAGCAatgATGACCAACAAAGA |
| | | ATTTACCTATAAGTCCAACGTATGCAATAATTGTGGCGACC |
| | | AGGTGGCAGCCTGCGAGGCAGAGTGCTTTCGTAATGACGTT |
| | | TACACAGCTTGTCACGAGGCTCAGAAAGGT |
| 662 | TVP-R9I | GAACCAGACGAGATATGCAGAGCAattATGACCAACAAAGA |
| | | ATTTACCTATAAGTCCAACGTATGCAATAATTGTGGCGACC |
| | | AGGTGGCAGCCTGCGAGGCAGAGTGCTTTCGTAATGACGTT |
| | | TACACAGCTTGTCACGAGGCTCAGAAAGGT |
| 663 | TVP-R9Q/T43A | GAACCAGACGAGATATGCAGAGCAcaaATGACCAACAAAGA |
| | | ATTTACCTATAAGTCCAACGTATGCAATAATTGTGGCGACC |
| | | AGGTGGCAGCCTGCGAGGCAGAGTGCTTTCGTAATGACGTT |
| | | TACgcaGCTTGTCACGAGGCTCAGAAAGGT |
| 664 | TVP-R9Q | GAACCAGACGAGATATGCAGAGCAcaaATGACCAACAAAGA |
| | | ATTTACCTATAAGTCCAACGTATGCAATAATTGTGGCGACC |
| | | AGGTGGCAGCCTGCGAGGCAGAGTGCTTTCGTAATGACGTT |
| | | TACACAGCTTGTCACGAGGCTCAGAAAGGT |
| 665 | TVP-R9C | GAACCAGACGAGATATGCAGAGCAtctATGACCAACAAAGA |
| | | ATTTACCTATAAGTCCAACGTATGCAATAATTGTGGCGACC |
| | | AGGTGGCAGCCTGCGAGGCAGAGTGCTTTCGTAATGACGTT |
| | | TACACAGCTTGTCACGAGGCTCAGAAAGGT |
| 666 | TVP-R9E | GAACCAGACGAGATATGCAGAGCAgaaATGACCAACAAAGA |
| | | ATTTACCTATAAGTCCAACGTATGCAATAATTGTGGCGACC |
| | | AGGTGGCAGCCTGCGAGGCAGAGTGCTTTCGTAATGACGTT |
| | | TACACAGCTTGTCACGAGGCTCAGAAAGGT |
| 667 | TVP-R9T | GAACCAGACGAGATATGCAGAGCAactATGACCAACAAAGA |
| | | ATTTACCTATAAGTCCAACGTATGCAATAATTGTGGCGACC |
| | | AGGTGGCAGCCTGCGAGGCAGAGTGCTTTCGTAATGACGTT |
| | | TACACAGCTTGTCACGAGGCTCAGAAAGGT |
| 668 | TVP-R9S | GAACCAGACGAGATATGCAGAGCAtctATGACCAACAAAGA |
| | | ATTTACCTATAAGTCCAACGTATGCAATAATTGTGGCGACC |
| | | AGGTGGCAGCCTGCGAGGCAGAGTGCTTTCGTAATGACGTT |
| | | TACACAGCTTGTCACGAGGCTCAGAAAGGT |
| 669 | TVP-T43F | GAACCAGACGAGATATGCAGAGCAAGGATGACCAACAAAGA |
| | | ATTTACCTATAAGTCCAACGTATGCAATAATTGTGGCGACC |
| | | AGGTGGCAGCCTGCGAGGCAGAGTGCTTTCGTAATGACGTT |
| | | TACtttGCTTGTCACGAGGCTCAGAAAGGT |
| 670 | TVP-T43P | GAACCAGACGAGATATGCAGAGCAAGGATGACCAACAAAGA |
| | | ATTTACCTATAAGTCCAACGTATGCAATAATTGTGGCGACC |
| | | AGGTGGCAGCCTGCGAGGCAGAGTGCTTTCGTAATGACGTT |
| | | TACcctGCTTGTCACGAGGCTCAGAAAGGT |
| 671 | TVP-T43Y | GAACCAGACGAGATATGCAGAGCAAGGATGACCAACAAAGA |
| | | ATTTACCTATAAGTCCAACGTATGCAATAATTGTGGCGACC |
| | | AGGTGGCAGCCTGCGAGGCAGAGTGCTTTCGTAATGACGTT |
| | | TACtatGCTTGTCACGAGGCTCAGAAAGGT |
| 672 | TVP-T43K | GAACCAGACGAGATATGCAGAGCAAGGATGACCAACAAAGA |
| | | ATTTACCTATAAGTCCAACGTATGCAATAATTGTGGCGACC |
| | | AGGTGGCAGCCTGCGAGGCAGAGTGCTTTCGTAATGACGTT |
| | | TACaaaGCTTGTCACGAGGCTCAGAAAGGT |
| 673 | TVP-T43W | GAACCAGACGAGATATGCAGAGCAAGGATGACCAACAAAGA |
| | | ATTTACCTATAAGTCCAACGTATGCAATAATTGTGGCGACC |
| | | AGGTGGCAGCCTGCGAGGCAGAGTGCTTTCGTAATGACGTT |
| | | TACtggGCTTGTCACGAGGCTCAGAAAGGT |
| 674 | TVP-T43H | GAACCAGACGAGATATGCAGAGCAAGGATGACCAACAAAGA |
| | | ATTTACCTATAAGTCCAACGTATGCAATAATTGTGGCGACC |
| | | AGGTGGCAGCCTGCGAGGCAGAGTGCTTTCGTAATGACGTT |
| | | TACcatGCTTGTCACGAGGCTCAGAAAGGT |
| 675 | TVP-T43A | GAACCAGACGAGATATGCAGAGCAAGGATGACCAACAAAGA |
| | | ATTTACCTATAAGTCCAACGTATGCAATAATTGTGGCGACC |
| | | AGGTGGCAGCCTGCGAGGCAGAGTGCTTTCGTAATGACGTT |
| | | TACgctGCTTGTCACGAGGCTCAGAAAGGT |
| 676 | TVP-T43G | GAACCAGACGAGATATGCAGAGCAAGGATGACCAACAAAGA |
| | | ATTTACCTATAAGTCCAACGTATGCAATAATTGTGGCGACC |
| | | AGGTGGCAGCCTGCGAGGCAGAGTGCTTTCGTAATGACGTT |
| | | TACggtGCTTGTCACGAGGCTCAGAAAGGT |
| 677 | TVP-T43N | GAACCAGACGAGATATGCAGAGCAAGGATGACCAACAAAGA |
| | | ATTTACCTATAAGTCCAACGTATGCAATAATTGTGGCGACC |
| | | AGGTGGCAGCCTGCGAGGCAGAGTGCTTTCGTAATGACGTT |
| | | TACaatGCTTGTCACGAGGCTCAGAAAGGT |
| 678 | TVP-T43L | GAACCAGACGAGATATGCAGAGCAAGGATGACCAACAAAGA |
| | | ATTTACCTATAAGTCCAACGTATGCAATAATTGTGGCGACC |
| | | AGGTGGCAGCCTGCGAGGCAGAGTGCTTTCGTAATGACGTT |
| | | TACttaGCTTGTCACGAGGCTCAGAAAGGT |
| 679 | TVP-T43D | GAACCAGACGAGATATGCAGAGCAAGGATGACCAACAAAGA |
| | | ATTTACCTATAAGTCCAACGTATGCAATAATTGTGGCGACC |
| | | AGGTGGCAGCCTGCGAGGCAGAGTGCTTTCGTAATGACGTT |
| | | TACgatGCTTGTCACGAGGCTCAGAAAGGT |
| 680 | TVP-T43V | GAACCAGACGAGATATGCAGAGCAAGGATGACCAACAAAGA |
| | | ATTTACCTATAAGTCCAACGTATGCAATAATTGTGGCGACC |
| | | AGGTGGCAGCCTGCGAGGCAGAGTGCTTTCGTAATGACGTT |
| | | TACgtcGCTTGTCACGAGGCTCAGAAAGGT |
| 681 | TVP-T43M | GAACCAGACGAGATATGCAGAGCAAGGATGACCAACAAAGA |
| | | ATTTACCTATAAGTCCAACGTATGCAATAATTGTGGCGACC |
| | | AGGTGGCAGCCTGCGAGGCAGAGTGCTTTCGTAATGACGTT |
| | | TACatgGCTTGTCACGAGGCTCAGAAAGGT |
| 682 | TVP-T43I | GAACCAGACGAGATATGCAGAGCAAGGATGACCAACAAAGA |
| | | ATTTACCTATAAGTCCAACGTATGCAATAATTGTGGCGACC |
| | | AGGTGGCAGCCTGCGAGGCAGAGTGCTTTCGTAATGACGTT |
| | | TACattGCTTGTCACGAGGCTCAGAAAGGT |
| 683 | TVP-T43Q | GAACCAGACGAGATATGCAGAGCAAGGATGACCAACAAAGA |
| | | ATTTACCTATAAGTCCAACGTATGCAATAATTGTGGCGACC |
| | | AGGTGGCAGCCTGCGAGGCAGAGTGCTTTCGTAATGACGTT |
| | | TACcaaGCTTGTCACGAGGCTCAGAAAGGT |
| 684 | TVP-T43C | GAACCAGACGAGATATGCAGAGCAAGGATGACCAACAAAGA |
| | | ATTTACCTATAAGTCCAACGTATGCAATAATTGTGGCGACC |
| | | AGGTGGCAGCCTGCGAGGCAGAGTGCTTTCGTAATGACGTT |
| | | TACtctGCTTGTCACGAGGCTCAGAAAGGT |
| 685 | TVP-T43E | GAACCAGACGAGATATGCAGAGCAAGGATGACCAACAAAGA |
| | | ATTTACCTATAAGTCCAACGTATGCAATAATTGTGGCGACC |
| | | AGGTGGCAGCCTGCGAGGCAGAGTGCTTTCGTAATGACGTT |
| | | TACgaaGCTTGTCACGAGGCTCAGAAAGGT |
| 686 | TVP-T43T | GAACCAGACGAGATATGCAGAGCAAGGATGACCAACAAAGA |
| | | ATTTACCTATAAGTCCAACGTATGCAATAATTGTGGCGACC |
| | | AGGTGGCAGCCTGCGAGGCAGAGTGCTTTCGTAATGACGTT |
| | | TACACAGCTTGTCACGAGGCTCAGAAAGGT |
| 687 | TVP-T43S | GAACCAGACGAGATATGCAGAGCAAGGATGACCAACAAAGA |
| | | ATTTACCTATAAGTCCAACGTATGCAATAATTGTGGCGACC |
| | | AGGTGGCAGCCTGCGAGGCAGAGTGCTTTCGTAATGACGTT |
| | | TACtcaGCTTGTCACGAGGCTCAGAAAGGT |
| 688 | TVP-T43R | GAACCAGACGAGATATGCAGAGCAAGGATGACCAACAAAGA |
| | | ATTTACCTATAAGTCCAACGTATGCAATAATTGTGGCGACC |
| | | AGGTGGCAGCCTGCGAGGCAGAGTGCTTTCGTAATGACGTT |
| | | TACagaGCTTGTCACGAGGCTCAGAAAGGT |

[0295] Exemplary TVPs

[0296] An exemplary description of TVPs, and polynucleotides operable to encode TVP, is provided in International Application No. PCT/US21/28254, the disclosure of which is incorporated herein by reference in its entirety.

[0297] In some embodiments, a TVP comprises one or more mutations relative to the wild-type sequence of U1-agatoxin-Ta1b as set forth in SEQ ID NO:1. For example, in some embodiments, a TVP can have a first, second, or third mutation relative to the wild-type sequence of U1-agatoxin-Ta1b as set forth in SEQ ID NO:1.

[0298] In some embodiments, an insecticidal U₁-agatoxin-Ta1b variant polypeptide (TVP), can be a TVP comprising an amino acid sequence that is at least 50% identical, at least 55% identical, at least 60% identical, at least 65% identical, at least 70% identical, at least 75% identical, at least 80% identical, at least 81% identical, at least 82% identical, at least 83% identical, at least 84% identical, at least 85% identical, at least 86% identical, at least 87% identical, at least 88% identical, at least 89% identical, at least 90% identical, at least 91% identical, at least 92% identical, at least 93% identical, at least 94% identical, at least 95% identical, at least 96% identical, at least 97% identical, at least 98% identical, at least 99% identical, at least 99.5% identical, at least 99.6% identical, at least 99.7% identical, at least 99.8% identical, at least 99.9% identical, or 100% identical to the amino acid sequence to the amino acid sequence according to Formula (I): E-P-D-E-I-C-R-X₁-X₂-M-X₃-N-K-E-F-T-Y-X₄-S-N-V-C-N-N-C-G-D-Q-V-A-A-C-E-A-E-C-F-X₅-N-D-V-Y-Z₁-A-C-H-E-A-Q-X₆-X₇, wherein the polypeptide comprises at least one amino acid substitution relative to the wild-type sequence of U1-agatoxin-Ta1b as set forth in SEQ ID NO:1, and wherein X₁ is A, S, or N; X₂ is R, Q, N, A, G, N, L, D, V, M, I, C, E, T, or S; X₃ is T or P; X₄ is K or A; X₅ is R or A; Z₁ is T, S, A, F, P, Y, K, W, H, A, G, N, L, V, M, I, Q, C, E, or R; X₆ is K or absent; and X₇ is G or absent, or a pharmaceutically acceptable salt thereof.

[0299] In some embodiments, an insecticidal U₁-agatoxin-Ta1b variant polypeptide (TVP), can be a TVP comprising an amino acid sequence that is at least 50% identical, at least 55% identical, at least 60% identical, at least 65% identical, at least 70% identical, at least 75% identical, at least 80% identical, at least 81% identical, at least 82% identical, at least 83% identical, at least 84% identical, at least 85% identical, at least 86% identical, at least 87% identical, at least 88% identical, at least 89% identical, at least 90% identical, at least 91% identical, at least 92% identical, at least 93% identical, at least 94% identical, at least 95% identical, at least 96% identical, at least 97% identical, at least 98% identical, at least 99% identical, at least 99.5% identical, at least 99.6% identical, at least 99.7% identical, at least 99.8% identical, at least 99.9% identical, or 100% identical to the amino acid sequence to the amino acid sequence according to Formula (I): E-P-D-E-I-C-R-X₁-X₂-M-X₃-N-K-E-F-T-Y-X₄-S-N-V-C-N-N-C-G-D-Q-V-A-A-C-E-A-E-C-F-X₅-N-D-V-Y-Z₁-A-C-H-E-A-Q-X₆-X₇, wherein the polypeptide comprises at least one amino acid substitution relative to the wild-type sequence of U1-agatoxin-Ta1b as set forth in SEQ ID NO:1, and wherein X₁ is A, S, or N; X₂ is R, Q, N, A, G, N, L, D, V, M, I, C, E, T, or S; X₃ is T or P; X₄ is K or A; X₅ is R or A; Z₁ is T, S, A, F, P, Y, K, W, H, A, G, N, L, V, M, I, Q, C, E, or R; X₆ is K or absent; and X₇ is G or absent; and wherein the TVP has one amino acid substitution at X₁, X₂, X₃, X₄, or X₅, or a pharmaceutically acceptable salt thereof.

[0300] In some embodiments, an insecticidal U₁-agatoxin-Ta1b variant polypeptide (TVP), can be a TVP comprising an amino acid sequence that is at least 50% identical, at least 55% identical, at least 60% identical, at least 65% identical, at least 70% identical, at least 75% identical, at least 80% identical, at least 81% identical, at least 82% identical, at least 83% identical, at least 84% identical, at least 85% identical, at least 86% identical, at least 87% identical, at least 88% identical, at least 89% identical, at least 90% identical, at least 91% identical, at least 92% identical, at least 93% identical, at least 94% identical, at least 95% identical, at least 96% identical, at least 97% identical, at least 98% identical, at least 99% identical, at least 99.5% identical, at least 99.6% identical, at least 99.7% identical, at least 99.8% identical, at least 99.9% identical, or 100% identical to the amino acid sequence to the amino acid sequence according to Formula (I): E-P-D-E-I-C-R-X₁-X₂-M-X₃-N-K-E-F-T-Y-X₄-S-N-V-C-N-N-C-G-D-Q-V-A-A-C-E-A-E-C-F-X₅-N-D-V-Y-Z₁-A-C-H-E-A-Q-X₆-X₇, wherein the polypeptide comprises at least one amino acid substitution relative to the wild-type sequence of U1-agatoxin-Ta1b as set forth in SEQ ID NO:1, and wherein X₁ is A, S, or N; X₂ is R, Q, N, A, G, N, L, D, V, M, I, C, E, T, or S; X₃ is T or P; X₄ is K or A; X₅ is R or A; Z₁ is T, S, A, F, P, Y, K, W, H, A, G, N, L, V, M, I, Q, C, E, or R; X₆ is K or absent; and X₇ is G or absent; and wherein the TVP has one amino acid substitution at X₁, X₂, X₃, X₄, or X₅; and wherein X₇ is Glycine, or a pharmaceutically acceptable salt thereof.

[0301] In some embodiments, an insecticidal U₁-agatoxin-Ta1b variant polypeptide (TVP), can be a TVP comprising an amino acid sequence that is at least 50% identical, at least 55% identical, at least 60% identical, at least 65% identical, at least 70% identical, at least 75% identical, at least 80% identical, at least 81% identical, at least 82% identical, at least 83% identical, at least 84% identical, at least 85% identical, at least 86% identical, at least 87% identical, at least 88% identical, at least 89% identical, at least 90% identical, at least 91% identical, at least 92% identical, at least 93% identical, at least 94% identical, at least 95% identical, at least 96% identical, at least 97% identical, at least 98% identical, at least 99% identical, at least 99.5% identical, at least 99.6% identical, at least 99.7% identical, at least 99.8% identical, at least 99.9% identical, or 100% identical to the amino acid sequence to the amino acid sequence according to Formula (I): E-P-D-E-I-C-R-X₁-X₂-M-X₃-N-K-E-F-T-Y-X₄-S-N-V-C-N-N-C-G-D-Q-V-A-A-C-E-A-E-C-F-X₅-N-D-V-Y-Z₁-A-C-H-E-A-Q-X₆-X₇, wherein the polypeptide comprises at least one amino acid substitution relative to the wild-type sequence of U1-agatoxin-Ta1b as set forth in SEQ ID NO:1, and wherein X₁ is A, S, or N; X₂ is R, Q, N, A, G, N, L, D, V, M, I, C, E, T, or S; X₃ is T or P; X₄ is K or A; X₅ is R or A; Z₁ is T, S, A, F, P, Y, K, W, H, A, G, N, L, V, M, I, Q, C, E, or R; X₆ is K or absent; and X₇ is G or absent; and wherein the TVP has one amino acid substitution at X₁, X₂, X₃, X₄, or X₅; and wherein X₇ is absent, or a pharmaceutically acceptable salt thereof.

[0302] In some embodiments, an insecticidal U₁-agatoxin-Ta1b variant polypeptide (TVP), can be a TVP comprising an amino acid sequence that is at least 50% identical, at least 55% identical, at least 60% identical, at least 65% identical, at least 70% identical, at least 75% identical, at least 80% identical, at least 81% identical, at least 82% identical, at least 83% identical, at least 84% identical, at least 85% identical, at least 86% identical, at least 87% identical, at least 88% identical, at least 89% identical, at least 90% identical, at least 91% identical, at least 92% identical, at least 93% identical, at least 94% identical, at least 95% identical, at least 96% identical, at least 97% identical, at least 98% identical, at least 99% identical, at least 99.5% identical, at least 99.6% identical, at least 99.7% identical, at least 99.8% identical, at least 99.9% identical, or 100% identical to the amino acid sequence to the amino acid sequence according to Formula (I): E-P-D-E-I-C-R-X₁-X₂-M-X₃-N-K-E-F-T-Y-X₄-S-N-V-C-N-N-C-G-D-Q-V-A-A-C-E-A-E-C-F-X₅-N-D-V-Y-Z₁-A-C-H-E-A-Q-X₆-X₇, wherein the polypeptide comprises at least one amino acid substitution relative to the wild-type sequence of U1-agatoxin-Ta1b as set forth in SEQ ID NO:1, and wherein X₁ is A, S, or N; X₂ is R, Q, N, A, G, N, L, D, V, M, I, C, E, T, or S; X₃ is T or P; X₄ is K or A; X₅ is R or A; Z₁ is T, S, A, F, P, Y, K, W, H, A, G, N, L, V, M, I, Q, C, E, or R; X₆ is K or absent; and X₇ is G or absent; and wherein the TVP has one amino acid substitution at X₁, X₂, X₃, X₄, or X₅; and wherein X₆ and X₇ are absent, or a pharmaceutically acceptable salt thereof.

[0303] In some embodiments, an insecticidal U₁-agatoxin-Ta1b variant polypeptide (TVP), can be a TVP comprising an amino acid sequence that is at least 50% identical, at least 55% identical, at least 60% identical, at least 65% identical, at least 70% identical, at least 75% identical, at least 80% identical, at least 81% identical, at least 82% identical, at least 83% identical, at least 84% identical, at least 85% identical, at least 86% identical, at least 87% identical, at least 88% identical, at least 89% identical, at least 90% identical, at least 91% identical, at least 92% identical, at least 93% identical, at least 94% identical, at least 95% identical, at least 96% identical, at least 97% identical, at least 98% identical, at least 99% identical, at least 99.5% identical, at least 99.6% identical, at least 99.7% identical, at least 99.8% identical, at least 99.9% identical, or 100% identical to the amino acid sequence to the amino acid sequence according to Formula (I): E-P-D-E-I-C-R-X₁-X₂-M-X₃-N-K-E-F-T-Y-X₄-S-N-V-C-N-N-C-G-D-Q-V-A-A-C-E-A-E-C-F-X₅-N-D-V-Y-Z₁-A-C-H-E-A-Q-X₆-X₇, wherein the polypeptide comprises at least one amino acid substitution relative to the wild-type sequence of U1-agatoxin-Ta1b as set forth in SEQ ID NO:1, and wherein X₁ is A, S, or N; X₂ is R, Q, N, A, G, N, L, D, V, M, I, C, E, T, or S; X₃ is T or P; X₄ is K or A; X₅ is R or A; Z₁ is T, S, A, F, P, Y, K, W, H, A, G, N, L, V, M, I, Q, C, E, or R; X₆ is K or absent; and X₇ is G or absent; and wherein the TVP comprises an amino sequence as set forth in any one of SEQ ID NOs: 2-15, 49-53, 621-622, 624-628, 631-640, 642-651, or 653-654, or a pharmaceutically acceptable salt thereof.

[0304] In some embodiments, an insecticidal U₁-agatoxin-Ta1b variant polypeptide (TVP), can be a TVP comprising an amino acid sequence that is at least 50% identical, at least 55% identical, at least 60% identical, at least 65% identical, at least 70% identical, at least 75% identical, at least 80% identical, at least 81% identical, at least 82% identical, at least 83% identical, at least 84% identical, at least 85% identical, at least 86% identical, at least 87% identical, at least 88% identical, at least 89% identical, at least 90% identical, at least 91% identical, at least 92% identical, at least 93% identical, at least 94% identical, at least 95% identical, at least 96% identical, at least 97% identical, at least 98% identical, at least 99% identical, at least 99.5% identical, at least 99.6% identical, at least 99.7% identical, at least 99.8% identical, at least 99.9% identical, or 100% identical to the amino acid sequence to the amino acid sequence according to Formula (I): E-P-D-E-I-C-R-X₁-X₂-M-X₃-N-K-E-F-T-Y-X₄-S-N-V-C-N-N-C-G-D-Q-V-A-A-C-E-A-E-C-F-X₅-N-D-V-Y-Z₁-A-C-H-E-A-Q-X₆-X₇, wherein the polypeptide comprises at least one amino acid substitution relative to the wild-type sequence of U1-agatoxin-Ta1b as set forth in SEQ ID NO:1, and wherein X₁ is A, S, or N; X₂ is R, Q, N, A, G, N, L, D, V, M, I, C, E, T, or S; X₃ is T or P; X₄ is K or A; X₅ is R or A; Z₁ is T, S, A, F, P, Y, K, W, H, A, G, N, L, V, M, I, Q, C, E, or R; X₆ is K or absent; and X₇ is G or absent; and wherein the TVP is encoded by a polynucleotide sequence as set forth in any one of SEQ ID NOs: 17-30, 54-58, or 655-688, or a complementary nucleotide sequence thereof.

[0305] In some embodiments, an insecticidal U₁-agatoxin-Ta1b variant polypeptide (TVP), can be a TVP comprising an amino acid sequence that is at least 50% identical, at least 55% identical, at least 60% identical, at least 65% identical, at least 70% identical, at least 75% identical, at least 80% identical, at least 81% identical, at least 82% identical, at least 83% identical, at least 84% identical, at least 85% identical, at least 86% identical, at least 87% identical, at least 88% identical, at least 89% identical, at least 90% identical, at least 91% identical, at least 92% identical, at least 93% identical, at least 94% identical, at least 95% identical, at least 96% identical, at least 97% identical, at least 98% identical, at least 99% identical, at least 99.5% identical, at least 99.6% identical, at least 99.7% identical, at least 99.8% identical, at least 99.9% identical, or 100% identical to the amino acid sequence to the amino acid sequence according to Formula (I): E-P-D-E-I-C-R-X₁-X₂-M-X₃-N-K-E-F-T-Y-X₄-S-N-V-C-N-N-C-G-D-Q-V-A-A-C-E-A-E-C-F-X₅-N-D-V-Y-Z₁-A-C-H-E-A-Q-X₆-X₇, wherein the polypeptide comprises at least one amino acid substitution relative to the wild-type sequence of U1-agatoxin-Ta1b as set forth in SEQ ID NO:1, and wherein X₁ is A, S, or N; X₂ is R, Q, N, A, G, N, L, D, V, M, I, C, E, T, or S; X₃ is T or P; X₄ is K or A; X₅ is R or A; Z₁ is T, S, A, F, P, Y, K, W, H, A, G, N, L, V, M, I, Q, C, E, or R; X₆ is K or absent; and X₇ is G or absent; and wherein the TVP further comprises a homopolymer or heteropolymer of two or more TVPs, wherein the amino acid sequence of each TVP is the same or different.

[0306] In some embodiments, an insecticidal U₁-agatoxin-Ta1b variant polypeptide (TVP), can be a TVP comprising an amino acid sequence that is at least 50% identical, at least 55% identical, at least 60% identical, at least 65% identical, at least 70% identical, at least 75% identical, at least 80% identical, at least 81% identical, at least 82% identical, at least 83% identical, at least 84% identical, at least 85% identical, at least 86% identical, at least 87% identical, at least 88% identical, at least 89% identical, at least 90% identical, at least 91% identical, at least 92% identical, at least 93% identical, at least 94% identical, at least 95% identical, at least 96% identical, at least 97% identical, at least 98% identical, at least 99% identical, at least 99.5% identical, at least 99.6% identical, at least 99.7% identical, at least 99.8% identical, at least 99.9% identical, or 100% identical to the amino acid sequence to the amino acid sequence according to Formula (I): E-P-D-E-I-C-R-X₁-X₂-M-X₃-N-K-E-F-T-Y-X₄-S-N-V-C-N-N-C-G-D-Q-V-A-A-C-E-A-E-C-F-X₅-N-D-V-Y-Z₁-A-C-H-E-A-Q-X₆-X₇, wherein the polypeptide comprises at least one amino acid substitution relative to the wild-type sequence of U1-agatoxin-Ta1b as set forth in SEQ ID NO:1, and wherein X₁ is A, S, or N; X₂ is R, Q, N, A, G, N, L, D, V, M, I, C, E, T, or S; X₃ is T or P; X₄ is K or A;

[0307] X₅ is R or A; Z₁ is T, S, A, F, P, Y, K, W, H, A, G, N, L, V, M, I, Q, C, E, or R; X₆ is K or absent; and X₇ is G or absent; and wherein the TVP is a fused protein comprising two or more TVPs separated by a cleavable or non-cleavable linker, and wherein the amino acid sequence of each TVP may be the same or different.

[0308] In some embodiments, an insecticidal U₁-agatoxin-Ta1b variant polypeptide (TVP), can be a TVP comprising an amino acid sequence that is at least 50% identical, at least 55% identical, at least 60% identical, at least 65% identical, at least 70% identical, at least 75% identical, at least 80% identical, at least 81% identical, at least 82% identical, at least 83% identical, at least 84% identical, at least 85% identical, at least 86% identical, at least 87% identical, at least 88% identical, at least 89% identical, at least 90% identical, at least 91% identical, at least 92% identical, at least 93% identical, at least 94% identical, at least 95% identical, at least 96% identical, at least 97% identical, at least 98% identical, at least 99% identical, at least 99.5% identical, at least 99.6% identical, at least 99.7% identical, at least 99.8% identical, at least 99.9% identical, or 100% identical to the amino acid sequence to the amino acid sequence according to Formula (I): E-P-D-E-I-C-R-X₁-X₂-M-X₃-N-K-E-F-T-Y-X₄-S-N-V-C-N-N-C-G-D-Q-V-A-A-C-E-A-E-C-F-X₅-N-D-V-Y-Z₁-A-C-H-E-A-Q-X₆-X₇, wherein the polypeptide comprises at least one amino acid substitution relative to the wild-type sequence of U1-agatoxin-Ta1b as set forth in SEQ ID NO:1, and wherein X₁ is A, S, or N; X₂ is R, Q, N, A, G, N, L, D, V, M, I, C, E, T, or S; X₃ is T or P; X₄ is K or A; X₅ is R or A; Z₁ is T, S, A, F, P, Y, K, W, H, A, G, N, L, V, M, I, Q, C, E, or R; X₆ is K or absent; and X₇ is G or absent; and wherein the TVP is a fused protein comprising two or more TVPs separated by a cleavable or non-cleavable linker, and wherein the amino acid sequence of each TVP may be the same or different, and wherein the linker is cleavable inside the gut or hemolymph of an insect.

[0309] In some embodiments, the linker has an amino acid sequence as set forth in any one of SEQ ID NOs: 61-70.

[0310] In some embodiments, an insecticidal U₁-agatoxin-Ta1b variant polypeptide (TVP), can be a TVP comprising an amino acid sequence that is at least 50% identical, at least 55% identical, at least 60% identical, at least 65% identical, at least 70% identical, at least 75% identical, at least 80% identical, at least 81% identical, at least 82% identical, at least 83% identical, at least 84% identical, at least 85% identical, at least 86% identical, at least 87% identical, at least 88% identical, at least 89% identical, at least 90% identical, at least 91% identical, at least 92% identical, at least 93% identical, at least 94% identical, at least 95% identical, at least 96% identical, at least 97% identical, at least 98% identical, at least 99% identical, at least 99.5% identical, at least 99.6% identical, at least 99.7% identical, at least 99.8% identical, at least 99.9% identical, or 100% identical to the amino acid sequence to the amino acid sequence according to Formula (I): E-P-D-E-I-C-R-X₁-X₂-M-X₃-N-K-E-F-T-Y-X₄-S-N-V-C-N-N-C-G-D-Q-V-A-A-C-E-A-E-C-F-X₅-N-D-V-Y-Z₁-A-C-H-E-A-Q-X₆-X₇, wherein the polypeptide comprises at least one amino acid substitution relative to the wild-type sequence of U1-agatoxin-Ta1b as set forth in SEQ ID NO:1, and wherein X₁ is A, S, or N; X₂ is R, Q, N, A, G, N, L, D, V, M, I, C, E, T, or S; X₃ is T or P; X₄ is K or A; X₅ is R or A; Z₁ is T, S, A, F, P, Y, K, W, H, A, G, N, L, V, M, I, Q, C, E, or R; X₆ is K or absent; and X₇ is G or absent; and wherein if Z₁ is T or S, then the TVP is glycosylated, or a pharmaceutically acceptable salt thereof.

[0311] In some embodiments, an insecticidal U₁-agatoxin-Ta1b variant polypeptide (TVP), can be a TVP comprising an amino acid sequence that is at least 50% identical, at least 55% identical, at least 60% identical, at least 65% identical, at least 70% identical, at least 75% identical, at least 80% identical, at least 81% identical, at least 82% identical, at least 83% identical, at least 84% identical, at least 85% identical, at least 86% identical, at least 87% identical, at least 88% identical, at least 89% identical, at least 90% identical, at least 91% identical, at least 92% identical, at least 93% identical, at least 94% identical, at least 95% identical, at least 96% identical, at least 97% identical, at least 98% identical, at least 99% identical, at least 99.5% identical, at least 99.6% identical, at least 99.7% identical, at least 99.8% identical, at least 99.9% identical, or 100% identical to the amino acid sequence to the amino acid sequence

(SEQ ID NO: 51)
“EPDEICRAQMTNKEFTYKSNVCNNCGDQVAACEAECFRNDVYAACHEA
QKG”.

[0312] In some embodiments, an insecticidal U₁-agatoxin-Ta1b variant polypeptide (TVP), can be a TVP comprising an amino acid sequence that is at least 50% identical, at least 55% identical, at least 60% identical, at least 65% identical, at least 70% identical, at least 75% identical, at least 80% identical, at least 81% identical, at least 82% identical, at least 83% identical, at least 84% identical, at least 85% identical, at least 86% identical, at least 87% identical, at least 88% identical, at least 89% identical, at least 90% identical, at least 91% identical, at least 92% identical, at least 93% identical, at least 94% identical, at least 95% identical, at least 96% identical, at least 97% identical, at least 98% identical, at least 99% identical, at least 99.5% identical, at least 99.6% identical, at least 99.7% identical, at least 99.8% identical, at least 99.9% identical, or 100% identical to the amino acid sequence to the amino acid sequence according to Formula (II): E-P-D-E-I-C-R-A-X₁-M-T-N-K-E-F-T-Y-K-S-N-V-C-N-N-C-G-D-Q-V-A-A-C-E-A-E-C-F-R-N-D-V-Y-Z₁-A-C-H-E-A-Q-K-G; wherein the polypeptide comprises at least one amino acid substitution relative to the wild-type sequence of U1-agatoxin-Ta1b as set forth in SEQ ID NO:1, and wherein X₁ is R or Q; and Z₁ is T or A; or a pharmaceutically acceptable salt thereof.

[0313] In some embodiments, an insecticidal U₁-agatoxin-Ta1b variant polypeptide (TVP), can be a TVP comprising an amino acid sequence that is at least 50% identical, at least 55% identical, at least 60% identical, at least 65% identical, at least 70% identical, at least 75% identical, at least 80% identical, at least 81% identical, at least 82% identical, at least 83% identical, at least 84% identical, at least 85% identical, at least 86% identical, at least 87% identical, at least 88% identical, at least 89% identical, at least 90% identical, at least 91% identical, at least 92% identical, at least 93% identical, at least 94% identical, at least 95% identical, at least 96% identical, at least 97% identical, at least 98% identical, at least 99% identical, at least 99.5% identical, at least 99.6% identical, at least 99.7% identical, at least 99.8% identical, at least 99.9% identical, or 100% identical to the amino acid sequence to the amino acid sequence according to Formula (II): E-P-D-E-I-C-R-A-X₁-M-T-N-K-E-F-T-Y-K-S-N-V-C-N-N-C-G-D-Q-V-A-A-C-E-A-E-C-F-R-N-D-V-Y-Z₁-A-C-H-E-A-Q-K-G; wherein the polypeptide comprises at least one amino acid substitution relative to the wild-type sequence of U1-agatoxin-Ta1b as set forth in SEQ ID NO:1, and wherein X₁ is R or Q; and Z₁ is T or A; or a pharmaceutically acceptable salt thereof; wherein if Z₁ is T then the TVP is glycosylated.

[0314] In some embodiments, an insecticidal U₁-agatoxin-Ta1b variant polypeptide (TVP), can be a TVP comprising an amino acid sequence that is at least 50% identical, at least 55% identical, at least 60% identical, at least 65% identical, at least 70% identical, at least 75% identical, at least 80% identical, at least 81% identical, at least 82% identical, at least 83% identical, at least 84% identical, at least 85% identical, at least 86% identical, at least 87% identical, at least 88% identical, at least 89% identical, at least 90% identical, at least 91% identical, at least 92% identical, at least 93% identical, at least 94% identical, at least 95% identical, at least 96% identical, at least 97% identical, at least 98% identical, at least 99% identical, at least 99.5% identical, at least 99.6% identical, at least 99.7% identical, at least 99.8% identical, at least 99.9% identical, or 100% identical to the amino acid sequence to the amino acid sequence according to Formula (II): E-P-D-E-I-C-R-A-X₁-M-T-N-K-E-F-T-Y-K-S-N-V-C-N-N-C-G-D-Q-V-A-A-C-E-A-E-C-F-R-N-D-V-Y-Z₁-A-C-H-E-A-Q-K-G; wherein the polypeptide comprises at least one amino acid substitution relative to the wild-type sequence of U1-agatoxin-Ta1b as set forth in SEQ ID NO:1, and wherein X₁ is R or Q; and Z₁ is T or A; or a pharmaceutically acceptable salt thereof, wherein X₁ is Q; and Z₁ is A.

[0315] In some embodiments, an insecticidal U₁-agatoxin-Ta1b variant polypeptide (TVP), can be a TVP comprising an amino acid sequence that is at least 50% identical, at least 55% identical, at least 60% identical, at least 65% identical, at least 70% identical, at least 75% identical, at least 80% identical, at least 81% identical, at least 82% identical, at least 83% identical, at least 84% identical, at least 85% identical, at least 86% identical, at least 87% identical, at least 88% identical, at least 89% identical, at least 90% identical, at least 91% identical, at least 92% identical, at least 93% identical, at least 94% identical, at least 95% identical, at least 96% identical, at least 97% identical, at least 98% identical, at least 99% identical, at least 99.5% identical, at least 99.6% identical, at least 99.7% identical, at least 99.8% identical, at least 99.9% identical, or 100% identical to the amino acid sequence to the amino acid sequence as set forth in any one of SEQ ID NOs: 2, 49, or 51, or a pharmaceutically acceptable salt thereof.

[0316] In some embodiments, the TVP may comprise an amino acid sequence that is at least 50% identical, at least 55% identical, at least 60% identical, at least 65% identical, at least 70% identical, at least 75% identical, at least 80% identical, at least 81% identical, at least 82% identical, at least 83% identical, at least 84% identical, at least 85% identical, at least 86% identical, at least 87% identical, at least 88% identical, at least 89% identical, at least 90% identical, at least 91% identical, at least 92% identical, at least 93% identical, at least 94% identical, at least 95% identical, at least 96% identical, at least 97% identical, at least 98% identical, at least 99% identical, at least 99.5% identical, at least 99.6% identical, at least 99.7% identical, at least 99.8% identical, at least 99.9% identical, or 100% identical to an amino acid sequence:

(SEQ ID NO: 51)
“EPDEICRAQMTNKEFTYKSNVCNNCGDQVAACEAECFRNDVYAACHEA
QKG”.

[0317] In some preferred embodiments, a TVP can be a TVP-R9Q/T43A (SEQ ID NO: 51).

[0318] In various embodiments, polynucleotides encoding TVPs can be used to transform plant cells, yeast cells, or bacteria cells. In some embodiments, the insecticidal TVP transgenic proteins may be formulated into compositions that can be sprayed or otherwise applied in any manner known to those skilled in the art to the surface of plants or parts thereof. Accordingly, DNA constructs are provided herein, operable to encode one or more TVPs under the appropriate conditions in a host cell, for example, a plant cell. Methods for controlling a pest infection by a parasitic insect of a plant cell comprises administering or introducing a polynucleotide encoding a TVP as described herein to a plant, plant tissue, or a plant cell by recombinant techniques and growing said recombinantly altered plant, plant tissue or plant cell in a field exposed to the pest. Alternatively, TVPs can be formulated into a sprayable composition consisting of a TVP and an excipient, and applied directly to susceptible plants by direct application, such that upon ingestion of the TVP by the infectious insect results in a deleterious effect.

[0319] Scorpion Peptides and Toxins

[0320] In some embodiments, a CRIP can be any of the following scorpion peptides, polypeptides, and/or toxins: Imperatoxin-A (IpTxa), Potassium channel toxin alpha-KTx 10.2 (Cobatoxin-2), Potassium channel toxin alpha-KTx 11.1 (Parabutoxin-1), Potassium channel toxin alpha-KTx 11.2 (Parabutoxin-2), Potassium channel toxin alpha-KTx 11.3 (Parabutoxin-10), Potassium channel toxin alpha-KTx 12.1 (Butantoxin), Potassium channel toxin alpha-KTx 12.2 (Butantoxin), Potassium channel toxin alpha-KTx 12.3 (Butantoxin-like peptide), Potassium channel toxin alpha-KTx 15.1 (Peptide Aa1), Potassium channel toxin alpha-KTx 15.3 (Toxin AmmTX3), Potassium channel toxin alpha-KTx 15.6 (Discrepin), Potassium channel toxin alpha-KTx 16.1 (Tamulotoxin), Potassium channel toxin alpha-KTx 19.1 (Neurotoxin BmBKTx1), Potassium channel toxin alpha-KTx 1.3 (Iberiotoxin), Potassium channel toxin alpha-KTx 1.4 (Limbatotoxin), Potassium channel toxin alpha-KTx 1.7 (Lqh 15-1), Potassium channel toxin alpha-KTx 1.9 (Hongotoxin-2), Potassium channel toxin alpha-KTx 1.10 (Parabutoxin-3), Potassium channel toxin alpha-KTx 1.11 (Slotoxin), Potassium channel toxin alpha-KTx 1.13 (Charybdotoxin c), Potassium channel toxin alpha-KTx 2.1 (Noxiustoxin), Potassium channel toxin alpha-KTx 2.2 (Margatoxin), Potassium channel toxin alpha-KTx 2.3 (CllTx1), Potassium channel toxin alpha-KTx 2.4 (Noxiustoxin-2), Potassium channel toxin alpha-KTx 2.5 (Hongotoxin-1), Potassium channel toxin alpha-KTx 2.6 (Hongotoxin-3), Potassium channel toxin alpha-KTx 2.7 (CllTx2), Potassium channel toxin alpha-KTx 2.8 (Toxin Ce1), Potassium channel toxin alpha-KTx 2.9 (Toxin Ce2), Potassium channel toxin alpha-KTx 2.10 (Toxin Ce3), Potassium channel toxin alpha-KTx 2.11 (Toxin Ce4), Potassium channel toxin alpha-KTx 2.12 (Toxin Ce5), Potassium channel toxin alpha-KTx 3.1 (Kaliotoxin-1), Potassium channel toxin alpha-KTx 3.2 (Agitoxin-2), Potassium channel toxin alpha-KTx 3.3 (Agitoxin-3), Potassium channel toxin alpha-KTx 3.4 (Agitoxin-1), Potassium channel toxin alpha-KTx 3.7 (OsK-1), Potassium channel toxin alpha-KTx 3.8 (Charybdotoxin-like peptide Bs 6), Potassium channel toxin alpha-KTx 3.9 (Kaliotoxin-3), Potassium channel toxin alpha-KTx 4.1 (Tityustoxin K-alpha), Potassium channel toxin alpha-KTx 4.3 (Toxin TdK1), Potassium channel toxin alpha-KTx 4.4 (Toxin Tc30), Potassium channel toxin alpha-KTx 5.1 (Leiurotoxin-1), Potassium channel toxin alpha-KTx 5.2 (Leiurotoxin I-like toxin P05), Potassium channel toxin alpha-KTx 5.4 (Tamapin), Potassium channel toxin alpha-KTx 5.5 (Tamapin-2), Potassium channel toxin alpha-KTx 6.1 (Potassium channel-blocking toxin 1), Potassium channel toxin alpha-KTx 6.2 (Maurotoxin), Potassium channel toxin alpha-KTx 6.3 (Neurotoxin HsTX1), Potassium channel toxin alpha-KTx 6.12 (Anuroctoxin), Potassium channel toxin alpha-KTx 6.13 (Spinoxin), Potassium channel toxin alpha-KTx 6.14 (HgeTx1), Potassium channel toxin alpha-KTx 7.2 (Toxin PiTX-K-beta), Potassium channel toxin gamma-KTx 1.2 (Ergtoxin-like protein 1), Potassium channel toxin gamma-KTx 1.3 (Ergtoxin-like protein 1), Potassium channel toxin gamma-KTx 1.4 (Ergtoxin-like protein 1), Potassium channel toxin gamma-KTx 1.5 (Ergtoxin-like protein 1), Potassium channel toxin gamma-KTx 1.6 (Ergtoxin-like protein 1), Potassium channel toxin gamma-KTx 4.2 (Ergtoxin-like protein 5), Insectotoxin-I1. Small toxin (Peptide I), Insectotoxin-I3 (BeI3), Insectotoxin-I4 (BeI4), Insectotoxin-I5A, Neurotoxin 8 (Neurotoxin VIII), Probable toxin Lqh 8/6, Neurotoxin 9 (Neurotoxin IX), Maurocalcin (MCa), Chlorotoxin-like peptide Bs 14 (Bs14), Chlorotoxin (CTX), Neurotoxin P2, Insectotoxin-I5 (BeI5), Potassium channel toxin alpha-KTx 6.15 (Hemitoxin), Toxin GaTx1, AahIT1, Phaiodotoxin, BaIT2, BotIT1, BotIT2, BmK M1, BmK-M2, BmK-M4, BmK-M7, BmK IT-AP, Bom3, Bom4, BjaIT, Bj-xtrIT, BjIT2, LqhaIT, Lqhb1, LqhIT2, LqhdprIT3a, Lgh-xtrIT, Lqh3, Lqh6, Lqh7, LqqIT1, LqqIT2, Lqq3, OD1, Ts1, or Tz1.

[0321] In some embodiments, a CRIP can be a scorpion peptide having an amino acid sequence as set forth in any one of SEQ ID NOs: 88-191.

[0322] In some embodiments, a CRIP can be an imperatoxin. Imperatoxins are peptide toxins derived from the venom of the African scorpion (Pandinus imperator).

[0323] In some embodiments, a CRIP can be an imperatoxin, wherein the imperatoxin is Imperatoxin A (IpTx-a), or a variant thereof. In some embodiments, the IpTx-a has an amino acid sequence of GDCLPHLKRCKADNDCCGKKCKRRGTNAEKRCR (SEQ ID NO: 66).

[0324] In some embodiments, a CRIP can be an AaIT1 toxin. The protein toxin, AalT1, is a sodium channel site 4 toxin from North African desert scorpion (Androctonus australis). An exemplary AaIT1 toxin is a peptide having the amino acid sequence according to SEQ ID NO: 88 (NCBI accession No. P01497.2). AaIT1 is a site 4 toxin, which forces the insect sodium channel to open by lowering the activation reaction energy barrier.

[0325] In some embodiments, an scorpion peptide may comprise an amino acid sequence having at least 50%, at least 55%, at least 60%, at least 65%, at least 70%, at least 75%, at least 80%, at least 81%, at least 82%, at least 83%, at least 84%, at least 85%, at least 86%, at least 87%, at least 88%, at least 89%, at least 90%, at least 91%, at least 92%, at least 93%, at least 94%, at least 95%, at least 96%, at least 97%, at least 98%, at least 99%, at least 99.5%, at least 99.6%, at least 99.7%, at least 99.8%, at least 99.9%, or 100% amino acid sequence identity to SEQ ID NOs: 66, 88-191.

[0326] In some embodiments, a polynucleotide encoding a scorpion peptide or toxin can encode a scorpion peptide or toxin having an amino acid sequence that is at least 50% identical, at least 55% identical, at least 60% identical, at least 65% identical, at least 70% identical, at least 75% identical, at least 80% identical, at least 81% identical, at least 82% identical, at least 83% identical, at least 84% identical, at least 85% identical, at least 86% identical, at least 87% identical, at least 88% identical, at least 89% identical, at least 90% identical, at least 91% identical, at least 92% identical, at least 93% identical, at least 94% identical, at least 95% identical, at least 96% identical, at least 97% identical, at least 98% identical, at least 99% identical, at least 99.5% identical, at least 99.6% identical, at least 99.7% identical, at least 99.8% identical, at least 99.9% identical, or 100% identical to an amino acid sequence set forth in SEQ ID NOs: 66, 88-191.

[0327] Sea Anemone Peptides and Toxins

[0328] In some embodiments, a CRIP can be isolated from a sea anemone. For example, in some embodiments, the sea anemone can be Actinia equina; Anemonia erythraea; Anemonia sulcata; Anemonia viridis; Anthopleura elegantissima; Anthopleura fuscoviridis; Anthopleura xanthogrammica; Bunodosoma caissarum; Bunodosoma cangicum; Bunodosoma granulifera; Heteractis crispa; Parasicyonis actinostoloides; Radianthus paumotensis; or Stoichactis helianthus. In yet other embodiments, the sea anemone toxin can be Av2; an Av3; or a variant thereof.

[0329] In some embodiments, a CRIP can be one of the following sea anemone toxins: Toxin AETX-1 (AETX I), Toxin APETx1, Toxin APETx2, Antihypertensive protein BDS-1 (Blood depressing substance I), Antihypertensive protein BDS-2 (Blood depressing substance II), Neurotoxin Bg-2 (Bg II), Neurotoxin Bg-3 (Bg III), Toxin APE 1-1, Toxin APE 1-2, Neurotoxin-1 (Toxin ATX-I), Neurotoxin-1 (Neurotoxin I), Neurotoxin 1 (Toxin RTX-I), Neurotoxin 1 (Toxin SHP-I), Toxin APE 2-1, Toxin APE 2-2, Neurotoxin-2 (Toxin ATX-II), (aka AV2)Neurotoxin-2 (Toxin AFT-II), Neurotoxin 2 (Toxin RTX-II), Neurotoxin 2 (Neurotoxin II), Neurotoxin 3 homolog (Neurotoxin III homolog), Neurotoxin 3 (Toxin RTX-III), Neurotoxin 3 (Neurotoxin-III), Neurotoxin 4 (Toxin RTX-IV), Neurotoxin-5 (Toxin ATX-V), Neurotoxin 5 (Toxin RTX-V), Anthopleurin-A (Toxin AP-A), Anthopleurin-B (Toxin AP-B), Anthopleurin-C (Toxin AP-C), Potassium channel toxin Aek, Potassium channel toxin Bgk, Major neurotoxin BcIII, Neurotoxin BcIV, Cangitoxin (CGTX), Potassium channel toxin ShK, Toxin PCR1 (PCR1-2), Toxin PCR2 (PCR2-5), Toxin PCR3 (PCR2-1), Toxin PCR4 (PCR2-10), Toxin PCR6 (PCR3-7), Cangitoxin-2 (Cangitoxin II), or Cangitoxin-3 (Cangitoxin III).

[0330] In some embodiments, a CRIP can be a sea anemone peptide having an amino acid sequence as set forth in SEQ ID NOs: 371-411.

[0331] In some embodiments, a CRIP of the present invention can be one or more polypeptides derived from the sea anemone, Anemonia viridis, which possesses a variety of toxins that it uses to defend itself. One of the toxins derived from Anemonia viridis is the neurotoxin “Av3.” Av3 is a type III sea anemone toxin that inhibits the inactivation of voltage-gated sodium (Na t) channels at receptor site 3, resulting in contractile paralysis. The binding of an Av3 toxin to site 3 results in the inactivated state of the sodium channel to become destabilized, which in turn causes the channel to remain in the open position (see Blumenthal et al., Voltage-gated sodium channel toxins: poisons, probes, and future promise. Cell Biochem Biophys. 2003; 38(2):215-38). Av3 shows high selectivity for crustacean and insect sodium channels, and low selectivity for mammalian sodium channels (see Moran et al., Sea anemone toxins affecting voltage-gated sodium channels—molecular and evolutionary features, Toxicon. 2009 Dec. 15; 54(8): 1089-1101). An exemplary Av3 polypeptide from Anemonia viridis is provided having the amino acid sequence of SEQ ID NO:44.

[0332] In some embodiments, a CRIP of the present invention can be an Av3 variant polypeptide (AVP). In some embodiments, AVPs can have the following amino acid variations from SEQ ID NO:44: an N-terminal amino acid substitution of R1K relative to SEQ ID NO:44, changing the polypeptide sequence from the wild-type “RSCCPCYWGGCPWGQNCYPEGCSGPKV” to “KSCCPCYWGGCPWGQNCYPEGCSGPKV” (SEQ ID NO:45); C-terminal amino acid can be deleted relative to SEQ ID NO:44, changing the polypeptide sequence from the wild-type “RSCCPCYWGGCPWGQNCYPEGCSGPKV” to “RSCCPCYWGGCPWGQNCYPEGCSGPK” (SEQ ID NO:46); and/or an N-terminal mutation and a C-terminal mutation, wherein the N-terminal amino acid can have a substitution of R1K relative to SEQ ID NO:44, and the C-terminal amino acid can be deleted relative to SEQ ID NO:44, changing the polypeptide sequence from the wild-type

(SEQ ID NO: 47)
“RSCCPCYWGGCPWGQNCYPEGCSGPKV” to
“KSCCPCYWGGCPWGQNCYPEGCSGPK”.

[0333] In some embodiments, an illustrative Av3 peptide or variant thereof is described in the Applicant's PCT application (Application No. PCT/US19/51093) filed Sep. 13, 2019, entitled “Av3 Mutant Insecticidal Polypeptides and Methods for Producing and Using Same,” the disclosure of which, and the disclosure of Av3 peptides or variants thereof, are described and are incorporated by reference herein in its entirety.

[0334] In some embodiments, a sea anemone peptide may comprise an amino acid sequence having at least 50%, at least 55%, at least 60%, at least 65%, at least 70%, at least 75%, at least 80%, at least 81%, at least 82%, at least 83%, at least 84%, at least 85%, at least 86%, at least 87%, at least 88%, at least 89%, at least 90%, at least 91%, at least 92%, at least 93%, at least 94%, at least 95%, at least 96%, at least 97%, at least 98%, at least 99%, at least 99.5%, at least 99.6%, at least 99.7%, at least 99.8%, at least 99.9%, or 100% amino acid sequence identity to SEQ ID NOs: 44-47, and 371-411.

[0335] In some embodiments, a polynucleotide encoding a sea anemone peptide can encode a sea anemone peptide having an amino acid sequence that is at least 50% identical, at least 55% identical, at least 60% identical, at least 65% identical, at least 70% identical, at least 75% identical, at least 80% identical, at least 81% identical, at least 82% identical, at least 83% identical, at least 84% identical, at least 85% identical, at least 86% identical, at least 87% identical, at least 88% identical, at least 89% identical, at least 90% identical, at least 91% identical, at least 92% identical, at least 93% identical, at least 94% identical, at least 95% identical, at least 96% identical, at least 97% identical, at least 98% identical, at least 99% identical, at least 99.5% identical, at least 99.6% identical, at least 99.7% identical, at least 99.8% identical, at least 99.9% identical, or 100% identical to an amino acid sequence set forth in SEQ ID NOs: 44-47, and 371-411.

[0336] Cone Shell Peptides and Conotoxins

[0337] Conotoxins are toxins isolated from cone shells; these toxins act by interfering with neuronal communication. Examples of conotoxins include the α-, ω-, μ-, δ-, and κ-conotoxins. Briefly, the α-conotoxins (and αA- & φconotoxins) target nicotinic ligand gated channels; ω-conotoxins target voltage-gated calcium channels; μ-conotoxins target the voltage-gated sodium channels; δ-conotoxins target the voltage-gated sodium channel; and κ-conotoxins target the voltage-gated potassium channel.

[0338] In some embodiments, a CRIP can be isolated from organisms belonging to the Conus genus, wherein the peptide isolated is a conotoxin.

[0339] In some embodiments, a CRIP can be isolated from Conus amadis; Conus catus; Conus ermineus; Conus geographus; Conus gloriamaris; Conus kinoshitai; Conus magus; Conus marmoreus; Conus purpurascens; Conus stercusmuscarum; Conus striatus; Conus textile; or Conus tulipa.

[0340] Other CRIPs

[0341] In some embodiments, a CRIP can be a toxin, peptide, or protein (otherwise known as a venom- or poison-peptide or protein) that is produced and/or isolated from an arthropod, a spider, a scorpion, an insect, a bee, a wasp, a centipede, a crustacean, a reptile, a snake, a lizard, an amphibian, a frog, a salamander, a mollusk, a cone shell, a cnidarian, a sea anemone, a jellyfish, a hydrozoan, a cephalopod, an octopus, a squid, a cuttlefish, a fish, or a mammal.

[0342] In some embodiments, a CRIP can be a snake venom, or toxin therefrom.

[0343] CRIP-Insecticidal Proteins

[0344] CRIP-insecticidal proteins are any protein, peptide, polypeptide, amino acid sequence, configuration, or arrangement, consisting of: (1) at least one CRIP, or two or more CRIPs; and (2) additional non-CRIP peptides, polypeptides, or proteins that, e.g., in some embodiments, have the ability to do the following: increase the mortality and/or inhibit the growth of insects when the insects are exposed to a CRIP-insecticidal protein, relative to a CRIP alone; increase the expression of said CRIP-insecticidal protein, e.g., in a host cell or an expression system; and/or affect the post-translational processing of the CRIP-insecticidal protein.

[0345] In some embodiments, a CRIP-insecticidal protein can be a polymer comprising two or more CRIPs. In some embodiments, a CRIP-insecticidal protein can be a polymer comprising two or more CRIPs, wherein the CRIPs are operably linked via a linker peptide, e.g., a cleavable and/or non-cleavable linker.

[0346] In some embodiments, a CRIP-insecticidal protein can refer to a one or more CRIPs operably linked with one or more proteins such as a stabilizing domain (STA); an endoplasmic reticulum signaling protein (ERSP); an insect cleavable or insect non-cleavable linker (L); and/or any other combination thereof.

[0347] In some embodiments, a CRIP-insecticidal protein can be a non-naturally occurring protein comprising (1) a wild-type CRIP; and (2) additional peptides, polypeptides, or proteins, e.g., an ERSP; a linker; a STA; a UBI; or a histidine tag or similar marker.

[0348] In some embodiments, a CRIP-insecticidal protein can be a non-naturally occurring protein comprising (1) a wild-type CRIP; and (2) a non-naturally occurring CRIP.

[0349] In some embodiments, a CRIP-insecticidal protein can be a non-naturally occurring protein comprising (1) a wild-type CRIP; and (2) a non-naturally occurring CRIP; and (3) additional peptides, polypeptides, or proteins, e.g., an ERSP; a linker; a STA; a UBI; or a histidine tag or similar marker.

[0350] In some embodiments, a CRIP-insecticidal protein can comprise any of the CRIPs described herein.

[0351] In some embodiments, an insecticidal protein can comprise a one or more CRIPs as disclosed herein. In some embodiments, the insecticidal protein can comprise a CRIP homopolymer, e.g., two or more CRIP monomers that are the same CRIP. In some embodiments, the insecticidal protein can comprise a CRIP heteropolymer, e.g., two or more CRIP monomers, wherein the CRIP monomers are different.

[0352] In some embodiments, an insecticidal protein can comprise a fused protein comprising two or more CRIPs separated by a cleavable or non-cleavable linker, wherein the amino acid sequence of each CRIP may be the same or different.

[0353] In some embodiments, an insecticidal protein can comprise a fused protein comprising two or more CRIPs separated by a cleavable or non-cleavable linker, wherein the amino acid sequence of each CRIP may be the same or different, wherein the linker is cleavable inside the gut or hemolymph of an insect.

[0354] In some embodiments, an insecticidal protein can comprise a fused protein comprising two or more CRIPs separated by a cleavable or non-cleavable linker, wherein the amino acid sequence of each CRIP may be the same or different, wherein the linker is cleavable inside the gut of a mammal.

[0355] Exemplary methods for the generation of cleavable and non-cleavable linkers can be found in U.S. patent application Ser. No. 15/727,277; and PCT Application No. PCT/US2013/030042, the disclosure of which are incorporated by reference herein in their entirety.

[0356] Methods for Producing a Crip or Peptide-IA

[0357] Methods of producing proteins are well known in the art, and there are a variety of techniques available. For example, in some embodiments, proteins can be produced using recombinant methods, or chemically synthesized. The present disclosure provides methods for producing CRIPs, CRIP-insecticidal proteins, and other peptide insecticidal agents (Peptide-IAs). These methods are described in detail below.

[0358] In some embodiments, a CRIP of the present invention can be created using any known method for producing a protein. For example, in some embodiments, and without limitation, a CRIP can be created using a recombinant expression system, such as yeast expression system or a bacterial expression system. However, those having ordinary skill in the art will recognize that other methods of protein production are available.

[0359] In some embodiments, the present invention provides a method of producing a CRIP using a recombinant expression system.

[0360] In some embodiments, the present invention comprises, consists essentially of, or consists of, a method of producing a CRIP, said method comprising: (a) preparing a vector comprising a first expression cassette comprising, consisting essentially of, or consisting of, a polynucleotide operable to encode a CRIP, or a complementary nucleotide sequence thereof, (b) introducing the vector into a host cell, for example a bacteria or a yeast, or an insect, or a plant cell, or an animal cell; and (c) growing the yeast strain in a growth medium under conditions operable to enable expression of the CRIP and secretion into the growth medium. In some related embodiments, the host cell, is a yeast cell.

[0361] The invention is practicable in a wide variety of host cells (see host cell section below). Indeed, an end-user of the invention can practice the teachings thereof in any host cell of his or her choosing. Thus, in some embodiments, the host cell can be any host cell that satisfies the requirements of the end-user; i.e., in some embodiments, the expression of a CRIP may be accomplished using a variety of host cells, and pursuant to the teachings herein. For example, in some embodiments, a user may desire to use one specific type of host cell (e.g., a yeast cell or a bacteria cell) as opposed to another; the preference of a given host cell can range from availability to cost.

[0362] For example, in some embodiments, in some embodiments, the present invention comprises, consists essentially of, or consists of, a method of producing a CRIP, said method comprising: (a) preparing a vector comprising a first expression cassette comprising, consisting essentially of, or consisting of, a polynucleotide operable to encode a CRIP, or a complementary nucleotide sequence thereof; (b) introducing the vector into a host cell, for example a bacteria or a yeast, or an insect, or a plant cell, or an animal cell; and (c) growing the yeast strain in a growth medium under conditions operable to enable expression of the CRIP and secretion into the growth medium. In some related embodiments, the host cell, is a yeast cell.

[0363] Isolating and Mutating Wild-Type CRIPs

[0364] A CRIP or peptide-Insecticidal Agent (peptide-IA) can be obtained directly from the source (e.g., isolating said CRIP or peptide-IA from an animal). Mutant CRIPs or peptide-IAs can be generated by creating a mutation in the wild-type CRIP or peptide-IA polynucleotide sequence; inserting that CRIP or peptide-IA polynucleotide sequence into the appropriate vector; transforming a host organism in such a way that the polynucleotide encoding a CRIP or peptide-IA is expressed; culturing the host organism to generate the desired amount of CRIP or peptide-IA; and then purifying the CRIP or peptide-IA from in and/or around host organism.

[0365] Producing a mutation in wild-type CRIP or peptide-IA polynucleotide sequence can be achieved by various means that are well known to those having ordinary skill in the art. Methods of mutagenesis include Kunkel's method; cassette mutagenesis; PCR site-directed mutagenesis; the “perfect murder” technique (delitto perfetto); direct gene deletion and site-specific mutagenesis with PCR and one recyclable marker; direct gene deletion and site-specific mutagenesis with PCR and one recyclable marker using long homologous regions; transplacement “pop-in pop-out” method; and CRISPR-Cas 9. Exemplary methods of site-directed mutagenesis can be found in Ruvkun & Ausubel, A general method for site-directed mutagenesis in prokaryotes. Nature. 1981 Jan. 1; 289(5793):85-8; Wallace et al., Oligonucleotide directed mutagenesis of the human beta-globin gene: a general method for producing specific point mutations in cloned DNA. Nucleic Acids Res. 1981 Aug. 11; 9(15):3647-56; Dalbadie-McFarland et al., Oligonucleotide-directed mutagenesis as a general and powerful method for studies of protein function. Proc Natl Acad Sci USA. 1982 November; 79(21):6409-13; Bachman. Site-directed mutagenesis. Methods Enzymol. 2013; 529:241-8; Carey et al., PCR-mediated site-directed mutagenesis. Cold Spring Harb Protoc. 2013 Aug. 1; 2013(8):738-42; and Cong et al., Multiplex genome engineering using CRISPR/Cas systems. Science. 2013 Feb. 15; 339(6121):819-23, the disclosures of all of the aforementioned references are incorporated herein by reference in their entireties.

[0366] Wild-type CRIPs, e.g., spider, scorpion, and/or other toxins can be isolated from the venom. For example, spider venom can be isolated from the venom glands of spiders (e.g., spiders such as Eratigena agrestis), using any of the techniques known to those having ordinary skill in the art. For example, in some embodiments, venom can be isolated from spiders according to the methods described in U.S. Pat. No. 5,688,764, the disclosure of which is incorporated herein by reference in its entirety.

[0367] A wild-type CRIP or peptide-IA polynucleotide sequence can be obtained by screening a genomic library using primer probes directed to the CRIP or peptide-IA polynucleotide sequence. Alternatively, wild-type CRIP or peptide-IA polynucleotide sequence and/or mutant CRIP or peptide-IA polynucleotide sequences can be chemically synthesized. For example, a CRIP or peptide-IA polynucleotide sequence and/or mutant CRIP or peptide-IA polynucleotide sequence can be generated using the oligonucleotide synthesis methods such as the phosphoramidite; triester, phosphite, or H-Phosphonate methods. See Engels, J. W. and Uhlmann, E. (1989), Gene Synthesis (New Synthetic Methods (77)). Angew. Chem. Int. Ed. Engl., 28: 716-734, the disclosure of which is incorporated herein by reference in its entirety.

[0368] Chemically Synthesizing CRIP or Peptide-IA Polynucleotides

[0369] In some embodiments, the polynucleotide sequence encoding the CRIP or peptide-IA can be chemically synthesized using commercially available polynucleotide synthesis services such as those offered by GENEWIZ® (e.g., TurboGENE™; PriorityGENE; and FragmentGENE), or SIGMA-ALDRICH® (e.g., Custom DNA and RNA Oligos Design and Order Custom DNA Oligos). Exemplary method for generating DNA and or custom chemically synthesized polynucleotides are well known in the art, and are illustratively provided in U.S. Pat. No. 5,736,135, Ser. No. 08/389,615, filed on Feb. 13, 1995, the disclosure of which is incorporated herein by reference in its entirety. See also Agarwal, et al., Chemical synthesis of polynucleotides. Angew Chem Int Ed Engl. 1972 June; 11(6):451-9; Ohtsuka et al., Recent developments in the chemical synthesis of polynucleotides. Nucleic Acids Res. 1982 Nov. 11; 10(21): 6553-6570; Sondek & Shortie. A general strategy for random insertion and substitution mutagenesis: sub stoichiometric coupling of trinucleotide phosphoramidites. Proc Natl Acad Sci USA. 1992 Apr. 15; 89(8): 3581-3585; Beaucage S. L., et al., Advances in the Synthesis of Oligonucleotides by the Phosphoramidite Approach. Tetrahedron, Elsevier Science Publishers, Amsterdam, NL, vol. 48, No. 12, 1992, pp. 2223-2311; Agrawal (1993) Protocols for Oligonucleotides and Analogs: Synthesis and Properties; Methods in Molecular Biology Vol. 20, the disclosures of which are incorporated herein by reference in their entirety.

[0370] Chemically synthesizing polynucleotides allows for a DNA sequence to be generated that is tailored to produce a desired polypeptide based on the arrangement of nucleotides within said sequence (i.e., the arrangement of cytosine [C], guanine [G], adenine [A] or thymine [T] molecules); the mRNA sequence that is transcribed from the chemically synthesized DNA polynucleotide can be translated to a sequence of amino acids, each amino acid corresponding to a codon in the mRNA sequence. Accordingly, the amino acid composition of a polypeptide chain that is translated from an mRNA sequence can be altered by changing the underlying codon that determines which of the 20 amino acids will be added to the growing polypeptide; thus, mutations in the DNA such as insertions, substitutions, deletions, and frameshifts may cause amino acid insertions, substitutions, or deletions, depending on the underlying codon.

[0371] Obtaining a CRIP or peptide-IA from a chemically synthesized DNA polynucleotide sequence and/or a wild-type DNA polynucleotide sequence that has been altered via mutagenesis can be achieved by cloning the DNA sequence into an appropriate vector. There are a variety of expression vectors available, host organisms, and cloning strategies known to those having ordinary skill in the art. For example, the vector can be a plasmid, which can introduce a heterologous gene and/or expression cassette into yeast cells to be transcribed and translated. The term “vector” is used to refer to a carrier nucleic acid molecule into which a nucleic acid sequence can be inserted for introduction into a cell where it can be replicated. A vector may contain “vector elements” such as an origin of replication (ORI); a gene that confers antibiotic resistance to allow for selection; multiple cloning sites; a promoter region; a selection marker for non-bacterial transfection; and a primer binding site. A nucleic acid sequence can be “exogenous,” which means that it is foreign to the cell into which the vector is being introduced or that the sequence is homologous to a sequence in the cell but in a position within the host cell nucleic acid in which the sequence is ordinarily not found. Vectors include plasmids, cosmids, viruses (bacteriophage, animal viruses, and plant viruses), and artificial chromosomes (e.g., YACs). One of skill in the art would be well equipped to construct a vector through standard recombinant techniques, which are described in Sambrook et al., 1989 and Ausubel et al., 1996, both incorporated herein by reference. In addition to encoding a CRIP or peptide-IA polynucleotide, a vector may encode a targeting molecule. A targeting molecule is one that directs the desired nucleic acid to a particular tissue, cell, or other location.

[0372] Vectors and Transformation

[0373] In some embodiments, a CRIP or peptide-IA polynucleotide can be cloned into a vector using a variety of cloning strategies, and commercial cloning kits and materials readily available to those having ordinary skill in the art. For example, the CRIP or peptide-IA polynucleotide can be cloned into a vector using such strategies as the SnapFast; Gateway; TOPO; Gibson; LIC; InFusionHD; or Electra strategies. There are numerous commercially available vectors that can be used to produce CRIP or peptide-IA. For example, a CRIP or peptide-IA polynucleotide can be generated using polymerase chain reaction (PCR), and combined with a pCR™II-TOPO vector, or a PCR™2.1-TOPO® vector (commercially available as the TOPO® TA Cloning® Kit from Invitrogen) for 5 minutes at room temperature; the TOPO® reaction can then be transformed into competent cells, which can subsequently be selected based on color change (see Janke et al., A versatile toolbox for PCR-based tagging of yeast genes: new fluorescent proteins, more markers and promoter substitution cassettes. Yeast. 2004 August; 21(11):947-62; see also, Adams et al. Methods in Yeast Genetics. Cold Spring Harbor, N Y, 1997, the disclosure of which is incorporated herein by reference in its entirety).

[0374] In some embodiments, a polynucleotide encoding a CRIP or peptide-IA can be cloned into a vector such as a plasmid, cosmid, virus (bacteriophage, animal viruses, and plant viruses), and/or artificial chromosome (e.g., YACs).

[0375] In some embodiments, a polynucleotide encoding a CRIP or peptide-IA can be inserted into a vector, for example, a plasmid vector using E. coli as a host, by performing the following: digesting about 2 to 5 μg of vector DNA using the restriction enzymes necessary to allow the DNA segment of interest to be inserted, followed by overnight incubation to accomplish complete digestion (alkaline phosphatase may be used to dephosphorylate the 5′-end in order to avoid self-ligation/recircularization); gel purify the digested vector. Next, amplify the DNA segment of interest, for example, a polynucleotide encoding an CRIP or peptide-IA, via PCR, and remove any excess enzymes, primers, unincorporated dNTPs, short-failed PCR products, and/or salts from the PCR reaction using techniques known to those having ordinary skill in the art (e.g., by using a PCR clean-up kit). Ligate the DNA segment of interest to the vector by creating a mixture comprising: about 20 ng of vector; about 100 to 1,000 ng or DNA segment of interest; 2 μL 10× buffer (i.e., 30 mM Tris-HCl 4 mM MgCl₂, 26 μM NAD, 1 mM DTT, 50 μg/ml BSA, pH 8, stored at 25° C.); 1 μL T4 DNA ligase; all brought to a total volume of 20 μL by adding H₂O. The ligation reaction mixture can then be incubated at room temperature for 2 hours, or at 16° C. for an overnight incubation. The ligation reaction (i.e., about 1 μL) can then be transformed to competent cell, for example, by using electroporation or chemical methods, and a colony PCR can then be performed to identify vectors containing the DNA segment of interest.

[0376] In some embodiments a polynucleotide encoding a CRIP or peptide-IA, along with other DNA segments together composing a CRIP or peptide-IA expression ORF can be designed for secretion from host yeast cells. An illustrative method of designing a CRIP or peptide-IA expression ORF is as follows: the ORF can begin with a signal peptide sequence, followed by a DNA sequence encoding a Kex2 cleavage site (Lysine-Arginine), and subsequently followed by the CRIP or peptide-IA polynucleotide transgene, with the addition of glycine-serine codons at the 5′-end, and finally a stop codon at the 3′-end. All these elements will then be expressed to a fusion peptide in yeast cells as a single open reading frame (ORF). An α-mating factor (αMF) signal sequence is most frequently used to facilitate metabolic processing of the recombinant insecticidal peptides through the endogenous secretion pathway of the recombinant yeast, i.e. the expressed fusion peptide will typically enter the Endoplasmic Reticulum, wherein the α-mating factor signal sequence is removed by signal peptidase activity, and then the resulting pro-insecticidal peptide will be trafficked to the Golgi Apparatus, in which the Lysine-Arginine dipeptide mentioned above is completely removed by Kex2 endoprotease, after which the mature, polypeptide (i.e., CRIP or peptide-IA), is secreted out of the cells.

[0377] In some embodiments, polypeptide expression levels in recombinant yeast cells can be enhanced by optimizing the codons based on the specific host yeast species. Naturally occurring frequencies of codons observed in endogenous open reading frames of a given host organism need not necessarily be optimized for high efficiency expression. Furthermore, different yeast species (for example, Kluyveromyces lactis, Pichia pastoris, Saccharomyces cerevisiae, etc.) have different optimal codons for high efficiency expression. Hence, codon optimization should be considered for the CRIP or peptide-IA expression ORF, including the sequence elements encoding the signal sequence, the Kex2 cleavage site and the CRIP or peptide-IA, because they are initially translated as one fusion peptide in the recombinant yeast cells.

[0378] In some embodiments, a codon-optimized CRIP or peptide-IA expression ORF can be ligated into a yeast-specific expression vectors for yeast expression. There are many expression vectors available for yeast expression, including episomal vectors and integrative vectors, and they are usually designed for specific yeast strains. One should carefully choose the appropriate expression vector in view of the specific yeast expression system which will be used for the peptide production. In some embodiments, integrative vectors can be used, which integrate into chromosomes of the transformed yeast cells and remain stable through cycles of cell division and proliferation. The integrative DNA sequences are homologous to targeted genomic DNA loci in the transformed yeast species, and such integrative sequences include pLAC4, 25S rDNA, pAOX1, and TRP2, etc. The locations of insecticidal peptide transgenes can be adjacent to the integrative DNA sequence (Insertion vectors) or within the integrative DNA sequence (replacement vectors).

[0379] In some embodiments, the expression vectors can contain E. coli elements for DNA preparation in E. coli, for example, E. coli replication origin, antibiotic selection marker, etc. In some embodiments, vectors can contain an array of the sequence elements needed for expression of the transgene of interest, for example, transcriptional promoters, terminators, yeast selection markers, integrative DNA sequences homologous to host yeast DNA, etc. There are many suitable yeast promoters available, including natural and engineered promoters, for example, yeast promoters such as pLAC4, pAOX1, pUPP, pADH1, pTEF, pGal1, etc., and others, can be used in some embodiments.

[0380] In some embodiments, selection methods such as acetamide prototrophy selection; zeocin-resistance selection; geneticin-resistance selection; nourseothricin-resistance selection; uracil deficiency selection; and/or other selection methods may be used. For example, in some embodiments, the Aspergillus nidulans amdS gene can be used as selectable marker. Exemplary methods for the use of selectable markers can be found in U.S. Pat. No. 6,548,285 (filed Apr. 3, 1997); U.S. Pat. No. 6,165,715 (filed Jun. 22, 1998); and 6,110,707 (filed Jan. 17, 1997), the disclosures of which are incorporated herein by reference in its entirety.

[0381] In some embodiments, a polynucleotide encoding a CRIP or peptide-IA can be inserted into a pKLAC1 plasmid. The pKLAC1 is commercially available from New England Biolabs® Inc., (item no. (NEB #E1000). The pKLAC1 is designed to accomplish high-level expression of recombinant protein (e.g., CRIP or peptide-IA) in the yeast Kluyveromyces lactis. The pKLAC1 plasmid can be ordered alone, or as part of a K. lactis Protein Expression Kit. The pKLAC1 plasmid can be linearized using the SacII or BstXI restriction enzymes, and possesses a MCS downstream of an αMF secretion signal. The αMF secretion signal directs recombinant proteins to the secretory pathway, which is then subsequently cleaved via Kex2 resulting in, for example, a CRIP or peptide-IA. Kex2 is a calcium-dependent serine protease, which is involved in activating proproteins of the secretory pathway, and is commercially available (PeproTech®; item no. 450-45).

[0382] In some embodiments, a polynucleotide encoding a CRIP or peptide-IA can be inserted into a pKlac1 plasmid, or subcloned into a pKlac1 plasmid subsequent to selection of yeast colonies transformed with pKLAC1 plasmids ligated with polynucleotide encoding a CRIP or peptide-IA. Yeast, for example K. lactis, transformed with a pKLAC1 plasmids ligated with polynucleotide encoding a CRIP or peptide-IA can be selected based on acetamidase (amdS), which allows transformed yeast cells to grow in YCB medium containing acetamide as its only nitrogen source. Once positive yeast colonies transformed with a pKLAC1 plasmids ligated with polynucleotide encoding a CRIP or peptide-IA are identified.

[0383] In some embodiments, a polynucleotide encoding a CRIP or peptide-IA can be inserted into other commercially available plasmids and/or vectors that are readily available to those having skill in the art, e.g., plasmids are available from Addgene (a non-profit plasmid repository); GenScript®; Takara®; Qiagen®; and Promega™.

[0384] In some embodiments, a polynucleotide encoding a TVP can be inserted into other commercially available plasmids and/or vectors that are readily available to those having skill in the art, e.g., plasmids are available from Addgene (a non-profit plasmid repository); GenScript®; Takara®; Qiagen®; and Promega™.

[0385] In some embodiments, a yeast cell transformed with one or more CRIP expression cassettes can produce a CRIP in a yeast culture with a yield of: at least 70 mg/L, at least 80 mg/L, at least 90 mg/L, at least 100 mg/L, at least 110 mg/L, at least 120 mg/L, at least 130 mg/L, at least 140 mg/L, at least 150 mg/L, at least 160 mg/L, at least 170 mg/L, at least 180 mg/L, at least 190 mg/L 200 mg/L, at least 500 mg/L, at least 750 mg/L, at least 1,000 mg/L, at least 1,250 mg/L, at least 1,500 mg/L, at least 1,750 mg/L, at least 2,000 mg/L, at least 2,500 mg/L, at least 3,000 mg/L, at least 3,500 mg/L, at least 4,000 mg/L, at least 4,500 mg/L, at least 5,000 mg/L, at least 5,500 mg/L, at least at least 6,000 mg/L, at least 6,500 mg/L, at least 7,000 mg/L, at least 7,500 mg/L, at least 8,000 mg/L, at least 8,500 mg/L, at least 9,000 mg/L, at least 9,500 mg/L, at least 10,000 mg/L, at least 11,000 mg/L, at least 12,000 mg/L, at least 12,500 mg/L, at least 13,000 mg/L, at least 14,000 mg/L, at least 15,000 mg/L, at least 16,000 mg/L, at least 17,000 mg/L, at least 17,500 mg/L, at least 18,000 mg/L, at least 19,000 mg/L, at least 20,000 mg/L, at least 25,000 mg/L, at least 30,000 mg/L, at least 40,000 mg/L, at least 50,000 mg/L, at least 60,000 mg/L, at least 70,000 mg/L, at least 80,000 mg/L, at least 90,000 mg/L, or at least 100,000 mg/L of CRIP per liter of medium.

[0386] In some embodiments, one or more expression cassettes comprising a polynucleotide operable to express a CRIP can be inserted into a vector, resulting in a yield ranging from about 100 mg/L of CRIP to about 100,000 mg/L; from about 110 mg/L to about 100,000 mg/L; from about 120 mg/L to about 100,000 mg/L; from about 130 mg/L to about 100,000 mg/L; from about 140 mg/L to about 100,000 mg/L; from about 150 mg/L to about 100,000 mg/L; from about 160 mg/L to about 100,000 mg/L; from about 170 mg/L to about 100,000 mg/L; from about 180 mg/L to about 100,000 mg/L; from about 190 mg/L to about 100,000 mg/L; from about 200 mg/L to about 100,000 mg/L; from about 250 mg/L to about 100,000 mg/L; from about 500 mg/L to about 100,000 mg/L; from about 750 mg/L to about 100,000 mg/L; from about 1000 mg/L to about 100,000 mg/L; from about 1000 mg/L to about 100,000 mg/L; from about 1500 mg/L to about 100,000 mg/L; from about 2000 mg/L to about 100,000 mg/L; from about 2500 mg/L to about 100,000 mg/L; from about 3000 mg/L to about 100,000 mg/L; from about 3500 mg/L to about 100,000 mg/L; from about 4000 mg/L to about 100,000 mg/L; from about 4500 mg/L to about 100,000 mg/L; from about 5000 mg/L to about 100,000 mg/L; from about 5500 mg/L to about 100,000 mg/L; from about 6000 mg/L to about 100,000 mg/L; from about 6500 mg/L to about 100,000 mg/L; from about 7000 mg/L to about 100,000 mg/L; from about 7500 mg/L to about 100,000 mg/L; from about 8000 mg/L to about 100,000 mg/L; from about 8500 mg/L to about 100,000 mg/L; from about 9000 mg/L to about 100,000 mg/L; from about 9500 mg/L to about 100,000 mg/L; from about 10000 mg/L to about 100,000 mg/L; from about 10500 mg/L to about 100,000 mg/L; from about 11000 mg/L to about 100,000 mg/L; from about 11500 mg/L to about 100,000 mg/L; from about 12000 mg/L to about 100,000 mg/L; from about 12500 mg/L to about 100,000 mg/L; from about 13000 mg/L to about 100,000 mg/L; from about 13500 mg/L to about 100,000 mg/L; from about 14000 mg/L to about 100,000 mg/L; from about 14500 mg/L to about 100,000 mg/L; from about 15000 mg/L to about 100,000 mg/L; from about 15500 mg/L to about 100,000 mg/L; from about 16000 mg/L to about 100,000 mg/L; from about 16500 mg/L to about 100,000 mg/L; from about 17000 mg/L to about 100,000 mg/L; from about 17500 mg/L to about 100,000 mg/L; from about 18000 mg/L to about 100,000 mg/L; from about 18500 mg/L to about 100,000 mg/L; from about 19000 mg/L to about 100,000 mg/L; from about 19500 mg/L to about 100,000 mg/L; from about 20000 mg/L to about 100,000 mg/L; from about 20500 mg/L to about 100,000 mg/L; from about 21000 mg/L to about 100,000 mg/L; from about 21500 mg/L to about 100,000 mg/L; from about 22000 mg/L to about 100,000 mg/L; from about 22500 mg/L to about 100,000 mg/L; from about 23000 mg/L to about 100,000 mg/L; from about 23500 mg/L to about 100,000 mg/L; from about 24000 mg/L to about 100,000 mg/L; from about 24500 mg/L to about 100,000 mg/L; from about 25000 mg/L to about 100,000 mg/L; from about 25500 mg/L to about 100,000 mg/L; from about 26000 mg/L to about 100,000 mg/L; from about 26500 mg/L to about 100,000 mg/L; from about 27000 mg/L to about 100,000 mg/L; from about 27500 mg/L to about 100,000 mg/L; from about 28000 mg/L to about 100,000 mg/L; from about 28500 mg/L to about 100,000 mg/L; from about 29000 mg/L to about 100,000 mg/L; from about 29500 mg/L to about 100,000 mg/L; from about 30000 mg/L to about 100,000 mg/L; from about 30500 mg/L to about 100,000 mg/L; from about 31000 mg/L to about 100,000 mg/L; from about 31500 mg/L to about 100,000 mg/L; from about 32000 mg/L to about 100,000 mg/L; from about 32500 mg/L to about 100,000 mg/L; from about 33000 mg/L to about 100,000 mg/L; from about 33500 mg/L to about 100,000 mg/L; from about 34000 mg/L to about 100,000 mg/L; from about 34500 mg/L to about 100,000 mg/L; from about 35000 mg/L to about 100,000 mg/L; from about 35500 mg/L to about 100,000 mg/L; from about 36000 mg/L to about 100,000 mg/L; from about 36500 mg/L to about 100,000 mg/L; from about 37000 mg/L to about 100,000 mg/L; from about 37500 mg/L to about 100,000 mg/L; from about 38000 mg/L to about 100,000 mg/L; from about 38500 mg/L to about 100,000 mg/L; from about 39000 mg/L to about 100,000 mg/L; from about 39500 mg/L to about 100,000 mg/L; from about 40000 mg/L to about 100,000 mg/L; from about 40500 mg/L to about 100,000 mg/L; from about 41000 mg/L to about 100,000 mg/L; from about 41500 mg/L to about 100,000 mg/L; from about 42000 mg/L to about 100,000 mg/L; from about 42500 mg/L to about 100,000 mg/L; from about 43000 mg/L to about 100,000 mg/L; from about 43500 mg/L to about 100,000 mg/L; from about 44000 mg/L to about 100,000 mg/L; from about 44500 mg/L to about 100,000 mg/L; from about 45000 mg/L to about 100,000 mg/L; from about 45500 mg/L to about 100,000 mg/L; from about 46000 mg/L to about 100,000 mg/L; from about 46500 mg/L to about 100,000 mg/L; from about 47000 mg/L to about 100,000 mg/L; from about 47500 mg/L to about 100,000 mg/L; from about 48000 mg/L to about 100,000 mg/L; from about 48500 mg/L to about 100,000 mg/L; from about 49000 mg/L to about 100,000 mg/L; from about 49500 mg/L to about 100,000 mg/L; from about 50000 mg/L to about 100,000 mg/L; from about 50500 mg/L to about 100,000 mg/L; from about 51000 mg/L to about 100,000 mg/L; from about 51500 mg/L to about 100,000 mg/L; from about 52000 mg/L to about 100,000 mg/L; from about 52500 mg/L to about 100,000 mg/L; from about 53000 mg/L to about 100,000 mg/L; from about 53500 mg/L to about 100,000 mg/L; from about 54000 mg/L to about 100,000 mg/L; from about 54500 mg/L to about 100,000 mg/L; from about 55000 mg/L to about 100,000 mg/L; from about 55500 mg/L to about 100,000 mg/L; from about 56000 mg/L to about 100,000 mg/L; from about 56500 mg/L to about 100,000 mg/L; from about 57000 mg/L to about 100,000 mg/L; from about 57500 mg/L to about 100,000 mg/L; from about 58000 mg/L to about 100,000 mg/L; from about 58500 mg/L to about 100,000 mg/L; from about 59000 mg/L to about 100,000 mg/L; from about 59500 mg/L to about 100,000 mg/L; from about 60000 mg/L to about 100,000 mg/L; from about 60500 mg/L to about 100,000 mg/L; from about 61000 mg/L to about 100,000 mg/L; from about 61500 mg/L to about 100,000 mg/L; from about 62000 mg/L to about 100,000 mg/L; from about 62500 mg/L to about 100,000 mg/L; from about 63000 mg/L to about 100,000 mg/L; from about 63500 mg/L to about 100,000 mg/L; from about 64000 mg/L to about 100,000 mg/L; from about 64500 mg/L to about 100,000 mg/L; from about 65000 mg/L to about 100,000 mg/L; from about 65500 mg/L to about 100,000 mg/L; from about 66000 mg/L to about 100,000 mg/L; from about 66500 mg/L to about 100,000 mg/L; from about 67000 mg/L to about 100,000 mg/L; from about 67500 mg/L to about 100,000 mg/L; from about 68000 mg/L to about 100,000 mg/L; from about 68500 mg/L to about 100,000 mg/L; from about 69000 mg/L to about 100,000 mg/L; from about 69500 mg/L to about 100,000 mg/L; from about 70000 mg/L to about 100,000 mg/L; from about 70500 mg/L to about 100,000 mg/L; from about 71000 mg/L to about 100,000 mg/L; from about 71500 mg/L to about 100,000 mg/L; from about 72000 mg/L to about 100,000 mg/L; from about 72500 mg/L to about 100,000 mg/L; from about 73000 mg/L to about 100,000 mg/L; from about 73500 mg/L to about 100,000 mg/L; from about 74000 mg/L to about 100,000 mg/L; from about 74500 mg/L to about 100,000 mg/L; from about 75000 mg/L to about 100,000 mg/L; from about 75500 mg/L to about 100,000 mg/L; from about 76000 mg/L to about 100,000 mg/L; from about 76500 mg/L to about 100,000 mg/L; from about 77000 mg/L to about 100,000 mg/L; from about 77500 mg/L to about 100,000 mg/L; from about 78000 mg/L to about 100,000 mg/L; from about 78500 mg/L to about 100,000 mg/L; from about 79000 mg/L to about 100,000 mg/L; from about 79500 mg/L to about 100,000 mg/L; from about 80000 mg/L to about 100,000 mg/L; from about 80500 mg/L to about 100,000 mg/L; from about 81000 mg/L to about 100,000 mg/L; from about 81500 mg/L to about 100,000 mg/L; from about 82000 mg/L to about 100,000 mg/L; from about 82500 mg/L to about 100,000 mg/L; from about 83000 mg/L to about 100,000 mg/L; from about 83500 mg/L to about 100,000 mg/L; from about 84000 mg/L to about 100,000 mg/L; from about 84500 mg/L to about 100,000 mg/L; from about 85000 mg/L to about 100,000 mg/L; from about 85500 mg/L to about 100,000 mg/L; from about 86000 mg/L to about 100,000 mg/L; from about 86500 mg/L to about 100,000 mg/L; from about 87000 mg/L to about 100,000 mg/L; from about 87500 mg/L to about 100,000 mg/L; from about 88000 mg/L to about 100,000 mg/L; from about 88500 mg/L to about 100,000 mg/L; from about 89000 mg/L to about 100,000 mg/L; from about 89500 mg/L to about 100,000 mg/L; from about 90000 mg/L to about 100,000 mg/L; from about 90500 mg/L to about 100,000 mg/L; from about 91000 mg/L to about 100,000 mg/L; from about 91500 mg/L to about 100,000 mg/L; from about 92000 mg/L to about 100,000 mg/L; from about 92500 mg/L to about 100,000 mg/L; from about 93000 mg/L to about 100,000 mg/L; from about 93500 mg/L to about 100,000 mg/L; from about 94000 mg/L to about 100,000 mg/L; from about 94500 mg/L to about 100,000 mg/L; from about 95000 mg/L to about 100,000 mg/L; from about 95500 mg/L to about 100,000 mg/L; from about 96000 mg/L to about 100,000 mg/L; from about 96500 mg/L to about 100,000 mg/L; from about 97000 mg/L to about 100,000 mg/L; from about 97500 mg/L to about 100,000 mg/L; from about 98000 mg/L to about 100,000 mg/L; from about 98500 mg/L to about 100,000 mg/L; from about 99000 mg/L to about 100,000 mg/L; or from about 99500 mg/L to about 100,000 mg/L of CRIP per liter of medium (supernatant of yeast fermentation broth).

[0387] In some In some embodiments, one or more expression cassettes comprising a polynucleotide operable to express a CRIP can be inserted into a vector, resulting in a yield ranging from about 100 mg/L of CRIP to about 100,000 mg/L; from about 100 mg/L to about 99500 mg/L; from about 100 mg/L to about 99000 mg/L; from about 100 mg/L to about 98500 mg/L; from about 100 mg/L to about 98000 mg/L; from about 100 mg/L to about 97500 mg/L; from about 100 mg/L to about 97000 mg/L; from about 100 mg/L to about 96500 mg/L; from about 100 mg/L to about 96000 mg/L; from about 100 mg/L to about 95500 mg/L; from about 100 mg/L to about 95000 mg/L; from about 100 mg/L to about 94500 mg/L; from about 100 mg/L to about 94000 mg/L; from about 100 mg/L to about 93500 mg/L; from about 100 mg/L to about 93000 mg/L; from about 100 mg/L to about 92500 mg/L; from about 100 mg/L to about 92000 mg/L; from about 100 mg/L to about 91500 mg/L; from about 100 mg/L to about 91000 mg/L; from about 100 mg/L to about 90500 mg/L; from about 100 mg/L to about 90000 mg/L; from about 100 mg/L to about 89500 mg/L; from about 100 mg/L to about 89000 mg/L; from about 100 mg/L to about 88500 mg/L; from about 100 mg/L to about 88000 mg/L; from about 100 mg/L to about 87500 mg/L; from about 100 mg/L to about 87000 mg/L; from about 100 mg/L to about 86500 mg/L; from about 100 mg/L to about 86000 mg/L; from about 100 mg/L to about 85500 mg/L; from about 100 mg/L to about 85000 mg/L; from about 100 mg/L to about 84500 mg/L; from about 100 mg/L to about 84000 mg/L; from about 100 mg/L to about 83500 mg/L; from about 100 mg/L to about 83000 mg/L; from about 100 mg/L to about 82500 mg/L; from about 100 mg/L to about 82000 mg/L; from about 100 mg/L to about 81500 mg/L; from about 100 mg/L to about 81000 mg/L; from about 100 mg/L to about 80500 mg/L; from about 100 mg/L to about 80000 mg/L; from about 100 mg/L to about 79500 mg/L; from about 100 mg/L to about 79000 mg/L; from about 100 mg/L to about 78500 mg/L; from about 100 mg/L to about 78000 mg/L; from about 100 mg/L to about 77500 mg/L; from about 100 mg/L to about 77000 mg/L; from about 100 mg/L to about 76500 mg/L; from about 100 mg/L to about 76000 mg/L; from about 100 mg/L to about 75500 mg/L; from about 100 mg/L to about 75000 mg/L; from about 100 mg/L to about 74500 mg/L; from about 100 mg/L to about 74000 mg/L; from about 100 mg/L to about 73500 mg/L; from about 100 mg/L to about 73000 mg/L; from about 100 mg/L to about 72500 mg/L; from about 100 mg/L to about 72000 mg/L; from about 100 mg/L to about 71500 mg/L; from about 100 mg/L to about 71000 mg/L; from about 100 mg/L to about 70500 mg/L; from about 100 mg/L to about 70000 mg/L; from about 100 mg/L to about 69500 mg/L; from about 100 mg/L to about 69000 mg/L; from about 100 mg/L to about 68500 mg/L; from about 100 mg/L to about 68000 mg/L; from about 100 mg/L to about 67500 mg/L; from about 100 mg/L to about 67000 mg/L; from about 100 mg/L to about 66500 mg/L; from about 100 mg/L to about 66000 mg/L; from about 100 mg/L to about 65500 mg/L; from about 100 mg/L to about 65000 mg/L; from about 100 mg/L to about 64500 mg/L; from about 100 mg/L to about 64000 mg/L; from about 100 mg/L to about 63500 mg/L; from about 100 mg/L to about 63000 mg/L; from about 100 mg/L to about 62500 mg/L; from about 100 mg/L to about 62000 mg/L; from about 100 mg/L to about 61500 mg/L; from about 100 mg/L to about 61000 mg/L; from about 100 mg/L to about 60500 mg/L; from about 100 mg/L to about 60000 mg/L; from about 100 mg/L to about 59500 mg/L; from about 100 mg/L to about 59000 mg/L; from about 100 mg/L to about 58500 mg/L; from about 100 mg/L to about 58000 mg/L; from about 100 mg/L to about 57500 mg/L; from about 100 mg/L to about 57000 mg/L; from about 100 mg/L to about 56500 mg/L; from about 100 mg/L to about 56000 mg/L; from about 100 mg/L to about 55500 mg/L; from about 100 mg/L to about 55000 mg/L; from about 100 mg/L to about 54500 mg/L; from about 100 mg/L to about 54000 mg/L; from about 100 mg/L to about 53500 mg/L; from about 100 mg/L to about 53000 mg/L; from about 100 mg/L to about 52500 mg/L; from about 100 mg/L to about 52000 mg/L; from about 100 mg/L to about 51500 mg/L; from about 100 mg/L to about 51000 mg/L; from about 100 mg/L to about 50500 mg/L; from about 100 mg/L to about 50000 mg/L; from about 100 mg/L to about 49500 mg/L; from about 100 mg/L to about 49000 mg/L; from about 100 mg/L to about 48500 mg/L; from about 100 mg/L to about 48000 mg/L; from about 100 mg/L to about 47500 mg/L; from about 100 mg/L to about 47000 mg/L; from about 100 mg/L to about 46500 mg/L; from about 100 mg/L to about 46000 mg/L; from about 100 mg/L to about 45500 mg/L; from about 100 mg/L to about 45000 mg/L; from about 100 mg/L to about 44500 mg/L; from about 100 mg/L to about 44000 mg/L; from about 100 mg/L to about 43500 mg/L; from about 100 mg/L to about 43000 mg/L; from about 100 mg/L to about 42500 mg/L; from about 100 mg/L to about 42000 mg/L; from about 100 mg/L to about 41500 mg/L; from about 100 mg/L to about 41000 mg/L; from about 100 mg/L to about 40500 mg/L; from about 100 mg/L to about 40000 mg/L; from about 100 mg/L to about 39500 mg/L; from about 100 mg/L to about 39000 mg/L; from about 100 mg/L to about 38500 mg/L; from about 100 mg/L to about 38000 mg/L; from about 100 mg/L to about 37500 mg/L; from about 100 mg/L to about 37000 mg/L; from about 100 mg/L to about 36500 mg/L; from about 100 mg/L to about 36000 mg/L; from about 100 mg/L to about 35500 mg/L; from about 100 mg/L to about 35000 mg/L; from about 100 mg/L to about 34500 mg/L; from about 100 mg/L to about 34000 mg/L; from about 100 mg/L to about 33500 mg/L; from about 100 mg/L to about 33000 mg/L; from about 100 mg/L to about 32500 mg/L; from about 100 mg/L to about 32000 mg/L; from about 100 mg/L to about 31500 mg/L; from about 100 mg/L to about 31000 mg/L; from about 100 mg/L to about 30500 mg/L; from about 100 mg/L to about 30000 mg/L; from about 100 mg/L to about 29500 mg/L; from about 100 mg/L to about 29000 mg/L; from about 100 mg/L to about 28500 mg/L; from about 100 mg/L to about 28000 mg/L; from about 100 mg/L to about 27500 mg/L; from about 100 mg/L to about 27000 mg/L; from about 100 mg/L to about 26500 mg/L; from about 100 mg/L to about 26000 mg/L; from about 100 mg/L to about 25500 mg/L; from about 100 mg/L to about 25000 mg/L; from about 100 mg/L to about 24500 mg/L; from about 100 mg/L to about 24000 mg/L; from about 100 mg/L to about 23500 mg/L; from about 100 mg/L to about 23000 mg/L; from about 100 mg/L to about 22500 mg/L; from about 100 mg/L to about 22000 mg/L; from about 100 mg/L to about 21500 mg/L; from about 100 mg/L to about 21000 mg/L; from about 100 mg/L to about 20500 mg/L; from about 100 mg/L to about 20000 mg/L; from about 100 mg/L to about 19500 mg/L; from about 100 mg/L to about 19000 mg/L; from about 100 mg/L to about 18500 mg/L; from about 100 mg/L to about 18000 mg/L; from about 100 mg/L to about 17500 mg/L; from about 100 mg/L to about 17000 mg/L; from about 100 mg/L to about 16500 mg/L; from about 100 mg/L to about 16000 mg/L; from about 100 mg/L to about 15500 mg/L; from about 100 mg/L to about 15000 mg/L; from about 100 mg/L to about 14500 mg/L; from about 100 mg/L to about 14000 mg/L; from about 100 mg/L to about 13500 mg/L; from about 100 mg/L to about 13000 mg/L; from about 100 mg/L to about 12500 mg/L; from about 100 mg/L to about 12000 mg/L; from about 100 mg/L to about 11500 mg/L; from about 100 mg/L to about 11000 mg/L; from about 100 mg/L to about 10500 mg/L; from about 100 mg/L to about 10000 mg/L; from about 100 mg/L to about 9500 mg/L; from about 100 mg/L to about 9000 mg/L; from about 100 mg/L to about 8500 mg/L; from about 100 mg/L to about 8000 mg/L; from about 100 mg/L to about 7500 mg/L; from about 100 mg/L to about 7000 mg/L; from about 100 mg/L to about 6500 mg/L; from about 100 mg/L to about 6000 mg/L; from about 100 mg/L to about 5500 mg/L; from about 100 mg/L to about 5000 mg/L; from about 100 mg/L to about 4500 mg/L; from about 100 mg/L to about 4000 mg/L; from about 100 mg/L to about 3500 mg/L; from about 100 mg/L to about 3000 mg/L; from about 100 mg/L to about 2500 mg/L; from about 100 mg/L to about 2000 mg/L; from about 100 mg/L to about 1500 mg/L; from about 100 mg/L to about 1000 mg/L; from about 100 mg/L to about 1000 mg/L; from about 100 mg/L to about 750 mg/L; from about 100 mg/L to about 500 mg/L; from about 100 mg/L to about 250 mg/L; from about 100 mg/L to about 100 mg/L; or from about 100 mg/L to about 110 mg/L of CRIP per liter of medium (supernatant of yeast fermentation broth).

[0388] In addition to the DNA polynucleotide sequence that encodes a CRIP or peptide-IA, additional DNA segments known as regulatory elements can be cloned into a vector that allow for enhanced expression of the foreign DNA or transgene; examples of such additional DNA segments include (1) promoters, terminators, and/or enhancer elements; (2) an appropriate mRNA stabilizing polyadenylation signal; (3) an internal ribosome entry site (IRES); (4) introns; and (5) post-transcriptional regulatory elements. The combination of a DNA segment of interest with any one of the foregoing cis-acting elements is called an “expression cassette.”

[0389] A single expression cassette can contain one or more of the aforementioned regulatory elements, and a polynucleotide operable to express a CRIP or peptide-IA. For example, in some embodiments, a CRIP or peptide-IA expression cassette can comprise polynucleotide operable to express a CRIP or peptide-IA, and an α-MF signal; Kex2 site; LAC4 terminator; ADN1 promoter; and an acetamidase (amdS) selection marker—flanked by LAC4 promoters on the 5′-end and 3′-end.

[0390] In some embodiments, there can be numerous expression cassettes cloned into a vector. For example, in some embodiments, there can be a first expression cassette comprising a polynucleotide operable to express a CRIP or peptide-IA. In alternative embodiments, there are two expression cassettes operable to encode a CRIP or peptide-IA (i.e., a double expression cassette). In other embodiments, there are three expression cassettes operable to encode a CRIP or peptide-IA (i.e., a triple expression cassette).

[0391] In some embodiments, a double expression cassette can be generated by subcloning a second CRIP or peptide-IA expression cassette into a vector containing a first CRIP or peptide-IA expression cassette.

[0392] In some embodiments, a triple expression cassette can be generated by subcloning a third CRIP or peptide-IA expression cassette into a vector containing a first and a second CRIP or peptide-IA expression cassette.

[0393] In some embodiments, a yeast cell transformed with one or more CRIP or peptide-IA expression cassettes can produce CRIP or peptide-IA in a yeast culture with a yield of: at least 70 mg/L, at least 80 mg/L, at least 90 mg/L, at least 100 mg/L, at least 110 mg/L, at least 120 mg/L, at least 130 mg/L, at least 140 mg/L, at least 150 mg/L, at least 160 mg/L, at least 170 mg/L, at least 180 mg/L, at least 190 mg/L 200 mg/L, at least 500 mg/L, at least 750 mg/L, at least 1,000 mg/L, at least 1,250 mg/L, at least 1,500 mg/L, at least 1,750 mg/L, at least 2,000 mg/L, at least 2,500 mg/L, at least 3,000 mg/L, at least 3,500 mg/L, at least 4,000 mg/L, at least 4,500 mg/L, at least 5,000 mg/L, at least 5,500 mg/L, at least at least 6,000 mg/L, at least 6,500 mg/L, at least 7,000 mg/L, at least 7,500 mg/L, at least 8,000 mg/L, at least 8,500 mg/L, at least 9,000 mg/L, at least 9,500 mg/L, at least 10,000 mg/L, at least 11,000 mg/L, at least 12,000 mg/L, at least 12,500 mg/L, at least 13,000 mg/L, at least 14,000 mg/L, at least 15,000 mg/L, at least 16,000 mg/L, at least 17,000 mg/L, at least 17,500 mg/L, at least 18,000 mg/L, at least 19,000 mg/L, at least 20,000 mg/L, at least 25,000 mg/L, at least 30,000 mg/L, at least 40,000 mg/L, at least 50,000 mg/L, at least 60,000 mg/L, at least 70,000 mg/L, at least 80,000 mg/L, at least 90,000 mg/L, or at least 100,000 mg/L of CRIP or peptide-IA per liter of yeast culture medium.

[0394] In some embodiments, one or more expression cassettes comprising a polynucleotide operable to express a CRIP or peptide-IA can be inserted into a vector, for example a pKlac1 plasmid, resulting in a yield of about 100 mg/L of CRIP or peptide-IA (supernatant of yeast fermentation broth). For example, in some embodiments, two expression cassettes comprising a polynucleotide operable to express a CRIP or peptide-IA can be inserted into a vector, for example a pKS482 plasmid, resulting in a yield of about 2 g/L of CRIP or peptide-IA (supernatant of yeast fermentation broth). Alternatively, in some embodiments, three expression cassettes comprising a polynucleotide operable to express a CRIP or peptide-IA can be inserted into a vector, for example a pKlac1T plasmid.

[0395] In some embodiments, multiple CRIP or peptide-IA expression cassettes can be transfected into yeast in order to enable integration of one or more copies of the optimized CRIP or peptide-IA transgene into the K. lactis genome. An exemplary method of introducing multiple CRIP or peptide-IA expression cassettes into a K. lactis genome is as follows: a CRIP or peptide-IA expression cassette DNA sequence is synthesized, comprising an intact LAC4 promoter element, a codon-optimized CRIP or peptide-IA expression ORF element and a pLAC4 terminator element; the intact expression cassette is ligated into the pKlac1 vector between Sal I and Kpn I restriction sites, downstream of the pLAC4 terminator of pKS477, resulting in the double transgene CRIP or peptide-IA expression vector, pKS482; the double transgene vectors, pKS482, are then linearized using Sac II restriction endonuclease and transformed into YCT306 strain of K. lactis by electroporation. The resulting yeast colonies are then grown on YCB agar plate supplemented with 5 mM acetamide, which only the acetamidase-expressing cells could use efficiently as a metabolic source of nitrogen. To evaluate the yeast colonies, about 100 to 400 colonies can be picked from the pKS482 yeast plates. Inoculates from the colonies are each cultured in 2.2 mL of the defined K. lactis media with 2% sugar alcohol added as a carbon source. Cultures are incubated at 23.5° C., with shaking at 280 rpm, for six days, at which point cell densities in the cultures will reach their maximum levels as indicated by light absorbance at 600 nm (OD600). Cells are then removed from the cultures by centrifugation at 4,000 rpm for 10 minutes, and the resulting supernatants (conditioned media) are filtered through 0.2 μM membranes for HPLC yield analysis.

[0396] Chemically Synthesizing Peptides

[0397] Peptide synthesis or the chemical synthesis or peptides and/or polypeptides can be used to generate CRIPs or peptide-IAs: these methods can be performed by those having ordinary skill in the art, and/or through the use of commercial vendors (e.g., GenScript®; Piscataway, New Jersey). For example, in some embodiments, chemical peptide synthesis can be achieved using Liquid phase peptide synthesis (LPPS), or solid phase peptide synthesis (SPPS).

[0398] In some embodiments, peptide synthesis can generally be achieved by using a strategy wherein the coupling the carboxyl group of a subsequent amino acid to the N-terminus of a preceding amino acid generates the nascent polypeptide chain—a process that is opposite to the type of polypeptide synthesis that occurs in nature.

[0399] Peptide deprotection is an important first step in the chemical synthesis of polypeptides. Peptide deprotection is the process in which the reactive groups of amino acids are blocked through the use of chemicals in order to prevent said amino acid's functional group from taking part in an unwanted or non-specific reaction or side reaction; in other words, the amino acids are “protected” from taking part in these undesirable reactions.

[0400] Prior to synthesizing the peptide chain, the amino acids must be “deprotected” to allow the chain to form (i.e., amino acids to bind). Chemicals used to protect the N-termini include 9-fluorenylmethoxycarbonyl (Fmoc), and tert-butoxycarbonyl (Boc), each of which can be removed via the use of a mild base (e.g., piperidine) and a moderately strong acid (e.g., trifluoracetic acid (TFA)), respectively.

[0401] The C-terminus protectant required is dependent on the type of chemical peptide synthesis strategy used: e.g., LPPS requires protection of the C-terminal amino acid, whereas SPPS does not owing to the solid support which acts as the protecting group. Side chain amino acids require the use of several different protecting groups that vary based on the individual peptide sequence and N-terminal protection strategy; typically, however, the protecting group used for side chain amino acids are based on the tert-butyl (tBu) or benzyl (Bzl) protecting groups.

[0402] Amino acid coupling is the next step in a peptide synthesis procedure. To effectuate amino acid coupling, the incoming amino acid's C-terminal carboxylic acid must be activated: this can be accomplished using carbodiimides such as diisopropylcarbodiimide (DIC), or dicyclohexylcarbodiimide (DCC), which react with the incoming amino acid's carboxyl group to form an O-acylisourea intermediate. The O-acylisourea intermediate is subsequently displaced via nucleophilic attack via the primary amino group on the N-terminus of the growing peptide chain. The reactive intermediate generated by carbodiimides can result in the racemization of amino acids. To avoid racemization of the amino acids, reagents such as 1-hydroxybenzotriazole (HOBt) are added in order to react with the O-acylisourea intermediate. Other couple agents that may be used include 2-(1H-benzotriazol-1-yl)-1,1,3,3-tetramethyluronium hexafluorophosphate (HBTU), and benzotriazol-1-yl-oxy-tris(dimethylamino)phosphonium hexafluorophosphate (BOP), with the additional activating bases. Finally, following amino acid deprotection and coupling,

[0403] At the end of the synthesis process, removal of the protecting groups from the polypeptide must occur—a process that usually occurs through acidolysis. Determining which reagent is required for peptide cleavage is a function of the protection scheme used and overall synthesis method. For example, in some embodiments, hydrogen bromide (HBr); hydrogen fluoride (HF); or trifluoromethane sulfonic acid (TFMSA) can be used to cleave Bzl and Boc groups. Alternatively, in other embodiments, a less strong acid such as TFA can effectuate acidolysis of tBut and Fmoc groups. Finally, peptides can be purified based on the peptide's physiochemical characteristics (e.g., charge, size, hydrophobicity, etc.). Techniques that can be used to purify peptides include Purification techniques include Reverse-phase chromatography (RPC); Size-exclusion chromatography; Partition chromatography; High-performance liquid chromatography (HPLC); and Ion exchange chromatography (IEC).

[0404] Exemplary methods of peptide synthesis can be found in Anderson G. W. and McGregor A. C. (1957) T-butyloxycarbonylamino acids and their use in peptide synthesis. Journal of the American Chemical Society. 79, 6180-3; Carpino L. A. (1957) Oxidative reactions of hydrazines. Iv. Elimination of nitrogen from 1, 1-disubstituted-2-arenesulfonhydrazidesl-4. Journal of the American Chemical Society. 79, 4427-31; McKay F. C. and Albertson N. F. (1957) New amine-masking groups for peptide synthesis. Journal of the American Chemical Society. 79, 4686-90; Merrifield R. B. (1963) Solid phase peptide synthesis. I. The synthesis of a tetrapeptide. Journal of the American Chemical Society. 85, 2149-54; Carpino L. A. and Han G. Y. (1972) 9-fluorenylmethoxycarbonyl amino-protecting group. The Journal of Organic Chemistry. 37, 3404-9; and A Lloyd-Williams P. et al. (1997) Chemical approaches to the synthesis of peptides and proteins. Boca Raton: CRC Press. 278; U.S. Pat. No. 3,714,140 (filed Mar. 16, 1971); U.S. Pat. No. 4,411,994 (filed Jun. 8, 1978); U.S. Pat. No. 7,785,832 (filed Jan. 20, 2006); U.S. Pat. No. 8,314,208 (filed Feb. 10, 2006); and 10,442,834 (filed Oct. 2, 2015); and United States Patent Application 2005/0165215 (filed Dec. 23, 2004), the disclosures of which are incorporated herein by reference in their entireties.

[0405] Additional exemplary methods of generating polynucleotides, peptides, and CRIPs, can be found in U.S. Patent Application Publication No. 20150148288 A1, the disclosure of which is incorporated herein by reference in its entirety.

[0406] Any of the methods described herein can be used to generate any of the CRIPs, CRIP-insecticidal proteins, or peptide-IAs described herein.

[0407] Cell Culture and Transformation Techniques

[0408] The terms “transformation” and “transfection” both describe the process of introducing exogenous and/or heterologous DNA or RNA to a host organism. Generally, those having ordinary skill in the art sometimes reserve the term “transformation” to describe processes where exogenous and/or heterologous DNA or RNA are introduced into a bacterial cell; and reserve the term “transfection” for processes that describe the introduction of exogenous and/or heterologous DNA or RNA into eukaryotic cells. However, as used herein, the term “transformation” and “transfection” are used synonymously, regardless of whether a process describes the introduction exogenous and/or heterologous DNA or RNA into a prokaryote (e.g., bacteria) or a eukaryote (e.g., yeast, plants, or animals).

[0409] In some embodiments, a host cell can be transformed using the following methods: electroporation; cell squeezing; microinjection; impalefection; the use of hydrostatic pressure; sonoporation; optical transfection; continuous infusion; lipofection; through the use of viruses such as adenovirus, adeno-associated virus, lentivirus, herpes simplex virus, and retrovirus; the chemical phosphate method; endocytosis via DEAE-dextran or polyethylenimine (PEI); protoplast fusion; hydrodynamic deliver; magnetofection; nucleoinfection; and/or others. Exemplary methods regarding transfection and/or transformation techniques can be found in Makrides (2003), Gene Transfer and Expression in Mammalian Cells, Elvesier; Wong, TK & Neumann, E. Electric field mediated gene transfer. Biochem. Biophys. Res. Commun. 107, 584-587 (1982); Potter & Heller, Transfection by Electroporation. Curr Protoc Mol Biol. 2003 May; CHAPTER: Unit-9.3; Kim & Eberwine, Mammalian cell transfection: the present and the future. Anal Bioanal Chem. 2010 August; 397(8): 3173-3178, each of these references are incorporated herein by reference in their entireties.

[0410] Electroporation is a technique in which electricity is applied to cells causing the cell membrane to become permeable; this in turn allows exogenous DNA to be introduced into the cells. Electroporation is readily known to those having ordinary skill in the art, and the tools and devices required to achieve electroporation are commercially available (e.g., Gene Pulser Xcell™ Electroporation Systems, Bio-Rad®; Neon® Transfection System for Electroporation, Thermo-Fisher Scientific; and other tools and/or devices). Exemplary methods of electroporation are illustrated in Potter & Heller, Transfection by Electroporation. Curr Protoc Mol Biol. 2003 May; CHAPTER: Unit-9.3; Saito (2015) Electroporation Methods in Neuroscience. Springer press; Pakhomov et al., (2017) Advanced Electroporation Techniques in Biology and Medicine. Taylor & Francis; the disclosure of which is incorporated herein by reference in its entirety.

[0411] In some embodiments, electroporation can be used to introduce a vector containing a polynucleotide encoding a CRIP or peptide-IA into yeast, for example, a CRIP or peptide-IA cloned into a pKlac1 plasmid, and transformed into K. lactis cells via electroporation, can be accomplished by inoculating about 10-200 mL of yeast extract peptone dextrose (YEPD) with a suitable yeast species, for example, Kluyveromyces lactis, Kluyveromyces marxianus, Saccharomyces cerevisiae, Pichia pastoris, etc., and incubate on a shaker at 30° C. until the early exponential phase of yeast culture (e.g. about 0.6 to 2×10 8 cells/mL); harvesting the yeast in sterile centrifuge tube and centrifuging at 3000 rpm for 5 minutes at 4° C. (note: keep cells chilled during the procedure) washing cells with 40 mL of ice cold, sterile deionized water, and pelleting the cells a 23,000 rpm for 5 minutes; repeating the wash step, and the resuspending the cells in 20 mL of 1M fermentable sugar, e.g. galactose, maltose, latotriose, sucrose, fructose or glucose and/or sugar alcohol, for example, erythritol, hydrogenated starch hydrolysates, isomalt, lactitol, maltitol, mannitol, and xylitol, followed by spinning down at 3,000 rpm for 5 minutes; resuspending the cells with proper volume of ice cold 1M fermentable sugar, e.g. galactose, maltose, latotriose, sucrose, fructose or glucose and/or a sugar alcohol, for example, erythritol, hydrogenated starch hydrolysates, isomalt, lactitol, maltitol, mannitol, and xylitol to final cell density of 3×10⁹ cell/mL; mixing 40 μl of the yeast suspension with about 1-4 μl of the vector containing a linear polynucleotide encoding a CRIP or peptide-IA (˜1 μg) in a pre-chilled 0.2 cm electroporation cuvette (note: ensure the sample is in contact with both sides of the aluminum cuvette); providing a single pulse at 2000 V, for optimal time constant of 5 ms of the RC circuit, the cells was then let recovered in 0.5 ml YED and 0.5 mL 1M fermentable sugar, e.g. galactose, maltose, latotriose, sucrose, fructose or glucose and/or a sugar alcohol, for example, erythritol, hydrogenated starch hydrolysates, isomalt, lactitol, maltitol, mannitol, and xylitol mixture, and then spreading onto selective plates.

[0412] In some embodiments, electroporation can be used to introduce a vector containing a polynucleotide encoding a CRIP or peptide-IA into plant protoplasts by incubating sterile plant material in a protoplast solution (e.g., around 8 mL of 10 mM 2-[N-morpholino]ethanesulfonic acid (MES), pH 5.5; 0.01% (w/v) pectylase; 1% (w/v) macerozyme; 40 mM CaCl₂; and 0.4 M mannitol) and adding the mixture to a rotary shaker for about 3 to 6 hours at 30° C. to produce protoplasts; removing debris via 80-μm-mesh nylon screen filtration; rinsing the screen with about 4 ml plant electroporation buffer (e.g., 5 mM CaCl₂; 0.4 M mannitol; and PBS); combining the protoplasts in a sterile 15 mL conical centrifuge tube, and then centrifuging at about 300×g for about 5 minutes; subsequent to centrifugation, discarding the supernatant and washing with 5 mL of plant electroporation buffer; resuspending the protoplasts in plant electroporation buffer at about 1.5×10⁶ to 2×10⁶ protoplasts per mL of liquid; transferring about 0.5-mL of the protoplast suspension into one or more electroporation cuvettes, set on ice, and adding the vector (note: for stable transformation, the vector should be linearized using anyone of the restriction methods described above, and about 1 to 10 μg of vector may be used; for transient expression, the vector may be retained in its supercoiled state, and about 10 to 40 μg of vector may be used); mixing the vector and protoplast suspension; placing the cuvette into the electroporation apparatus, and shocking for one or more times at about 1 to 2 kV (a 3- to 25-μF capacitance may be used initially while optimizing the reaction); returning the cuvette to ice; diluting the transformed cells 20-fold in complete medium; and harvesting the protoplasts after about 48 hours.

[0413] Host Cells

[0414] The methods, compositions, CRIPs and peptide-IAs of the present invention may be implemented in any cell type, e.g., a eukaryotic or prokaryotic cell.

[0415] In some embodiments, the host cell used to produce a CRIP, a CRIP-insecticidal protein, or a peptide-IA, is a prokaryote. For example, in some embodiments, the host cell may be an Archaebacteria or Eubacteria, such as Gram-negative or Gram-positive organisms. Examples of useful bacteria include Escherichia (e.g., E. coli), Bacilli (e.g., B. subtilis), Enterobacteria, Pseudomonas species (e.g., P. aeruginosa), Salmonella typhimurium, Serratia marcescans, Klebsiella, Proteus, Shigella, Rhizobia, Vitreoscilla, or Paracoccus.

[0416] In some embodiments, the host cell used to produce a CRIP, a CRIP-insecticidal protein, or a peptide-IA, may be a unicellular cell. For example, in some embodiments, the host cell may be bacterial cells such as gram positive bacteria.

[0417] In some embodiments, the host cell may be a bacteria selected from the following genera consisting of: Candidatus Chloracidobacterium, Arthrobacter, Corynebacterium, Frankia, Micrococcus, Mycobacterium, Propionibacterium, Streptomyces, Aquifex Bacteroides, Porphyromonas, Bacteroides, Porphyromonas, Flavobacterium, Chlamydia, Prosthecobacter, Verrucomicrobium, Chloroflexus, Chroococcus, Merismopedia, Synechococcus, Anabaena, Nostoc, Spirulina, Trichodesmium, Pleurocapsa, Prochlorococcus, Prochloron, Bacillus, Listeria, Staphylococcus, Clostridium, Dehalobacter, Epulopiscium, Ruminococcus, Enterococcus, Lactobacillus, Streptococcus, Erysipelothrix, Mycoplasma, Leptospirillum, Nitrospira, Thermodesulfobacterium, Gemmata, Pirellula, Planctomyces, Caulobacter, Agrobacterium, Bradyrhizobium, Brucella, Methylobacterium, Prosthecomicrobium, Rhizobium, Rhodopseudomonas, Sinorhizobium, Rhodobacter, Roseobacter, Acetobacter, Rhodospirillum, Rickettsia, Rickettsia conorii, Mitochondria, Wolbachia, Erythrobacter, Erythromicrobium, Sphingomonas, Alcaligenes, Burkholderia, Leptothrix, Sphaerotilus, Thiobacillus, Neisseria, Nitrosomonas, Gallionella, Spirillum, Azoarcus, Aeromonas, Succinomonas, Succinivibrio, Ruminobacter, Nitrosococcus, Thiocapsa, Enterobacter, Escherichia, Klebsiella, Salmonella, Shigella, Wigglesworthia, Yersinia, Coxiella, Legionella, Halomonas, Pasteurella, Acinetobacter, Azotobacter, Pseudomonas, Psychrobacter, Beggiatoa, Thiomargarita, Vibrio, Xanthomonas, Bdellovibrio, Campylobacter, Helicobacter, Myxococcus, Desulfosarcina, Geobacter, Desulfuromonas, Borrelia, Leptospira, Treponema, Petrotoga, Thermotoga, Deinococcus, or Thermus.

[0418] In some embodiments, the host cell used to produce a CRIP, a CRIP-insecticidal protein, or a peptide-IA, may be selected from one of the following bacteria species: Bacillus alkalophilus, Bacillus amyloliquefaciens, Bacillus brevis, Bacillus circulans, Bacillus coagulans, Bacillus lautus, Bacillus lentus, Bacillus licheniformis, Bacillus megaterium, Bacillus stearothermophilus, Bacillus subtilis, Bacillus thuringiensis, Streptomyces lividans, Streptomyces murinus, Streptomyces coelicolor, Streptomyces albicans, Streptomyces griseus, Streptomyces plicatosporus, Escherichia albertii, Escherichia blattae, Escherichia coli, Escherichia fergusonii, Escherichia hermannii, Escherichia senegalensis, Escherichia vulneris, Pseudomonas abietaniphila, Pseudomonas agarici, Pseudomonas agarolyticus, Pseudomonas alcaliphila, Pseudomonas alginovora, Pseudomonas andersonii, Pseudomonas antarctica, Pseudomonas asplenii, Pseudomonas azelaica, Pseudomonas batumici, Pseudomonas borealis, Pseudomonas brassicacearum, Pseudomonas chloritidismutans, Pseudomonas cremoricolorata, Pseudomonas diterpeniphila, Pseudomonas filiscindens, Pseudomonas frederiksbergensis, Pseudomonas gingeri, Pseudomonas graminis, Pseudomonas grimontii, Pseudomonas halodenitrificans, Pseudomonas halophila, Pseudomonas hibiscicola, Pseudomonas hydrogenovora, Pseudomonas indica, Pseudomonas japonica, Pseudomonas jessenii, Pseudomonas kilonensis, Pseudomonas koreensis, Pseudomonas lini, Pseudomonas lurida, Pseudomonas lutea, Pseudomonas marginata, Pseudomonas meridiana, Pseudomonas mesoacidophila, Pseudomonas pachastrellae, Pseudomonas palleroniana, Pseudomonas parafulva, Pseudomonas pavonanceae, Pseudomonas proteolyica, Pseudomonas psychrophila, Pseudomonas psychrotolerans, Pseudomonas pudica, Pseudomonas rathonis, Pseudomonas reactans, Pseudomonas rhizosphaerae, Pseudomonas salmononii, Pseudomonas thermaerum, Pseudomonas thermocarboxydovorans, Pseudomonas thermotolerans, Pseudomonas thivervalensis, Pseudomonas umsongensis, Pseudomonas vancouverensis, Pseudomonas wisconsinensis, Pseudomonas xanthomarina Pseudomonas xiamenensis, Pseudomonas aeruginosa, Pseudomonas alcaligenes, Pseudomonas anguilliseptica, Pseudomonas citronellolis, Pseudomonas flavescens, Pseudomonas jinjuensis, Pseudomonas mendocina, Pseudomonas nitroreducens, Pseudomonas oleovorans, Pseudomonas pseudoalcaligenes, Pseudomonas resinovorans, Pseudomonas straminae, Pseudomonas aurantiaca, Pseudomonas chlororaphis, Pseudomonas fragi, Pseudomonas lundensis, Pseudomonas taetrolens Pseudomonas azotoformans, Pseudomonas brenneri, Pseudomonas cedrina, Pseudomonas congelans, Pseudomonas corrugata, Pseudomonas costantinii, Pseudomonas extremorientalis, Pseudomonas fluorescens, Pseudomonas fulgida, Pseudomonas gessardii, Pseudomonas libanensis, Pseudomonas mandelii, Pseudomonas marginalis, Pseudomonas mediterranea, Pseudomonas migulae, Pseudomonas mucidolens, Pseudomonas orientalis, Pseudomonas poae, Pseudomonas rhodesiae, Pseudomonas synxantha, Pseudomonas tolaasii, Pseudomonas trivialis, Pseudomonas veronii Pseudomonas denitrificans, Pseudomonas pertucinogena, Pseudomonas fulva, Pseudomonas monteilii, Pseudomonas mosselii, Pseudomonas oryzihabitans, Pseudomonas plecoglossicida, Pseudomonas putida, Pseudomonas balearica, Pseudomonas luteola, or Pseudomonas stutzeri. Pseudomonas avellanae, Pseudomonas cannabina, Pseudomonas caricapapyae, Pseudomonas cichorii, Pseudomonas coronafaciens, Pseudomonas fuscovaginae, Pseudomonas tremae, or Pseudomonas viridiflava

[0419] In some embodiments, the host cell used to produce a CRIP, a CRIP-insecticidal protein, or a peptide-IA can be eukaryote.

[0420] In some embodiments, the host cell used to produce a CRIP, a CRIP-insecticidal protein, or a peptide-IA, may be a cell belonging to the clades: Opisthokonta; Viridiplantae (e.g., algae and plant); Amebozoa; Cercozoa; Alveolata; Marine flagellates; Heterokonta; Discicristata; or Excavata.

[0421] In some embodiments, the procedures and methods described here can be accomplished using a host cell that is, e.g., a Metazoan, a Choanoflagellata, or a fungi.

[0422] In some embodiments, the procedures and methods described here can be accomplished using a host cell that is a fungi. For example, in some embodiments, the host cell may be a cell belonging to the eukaryote phyla: Ascomycota, Basidiomycota, Chytridiomycota, Microsporidia, or Zygomycota

[0423] In some embodiments, the procedures and methods described here can be accomplished using a host cell that is a fungi belonging to one of the following genera: Aspergillus, Cladosporium, Magnaporthe, Morchella, Neurospora, Penicillium, Saccharomyces, Cryptococcus, or Ustilago.

[0424] In some embodiments, the procedures and methods described here can be accomplished using a host cell that is a fungi belonging to one of the following species: Saccharomyces cerevisiae, Saccharomyces boulardi, Saccharomyces uvarum; Aspergillus flavus, A. terreus, A. awamori; Cladosporium elatum, Cl. Herbarum, Cl. Sphaerospermum, and Cl. Cladosporioides; Magnaporthe grise, Magnaporthe oryzae, Magnaporthe rhizophila; Morchella deliciosa, Morchella esculenta, Morchella conica; Neurospora crassa, Neurospora intermedia, Neurospora tetrasperma; Penicillium notatum, Penicillium chrysogenum, Penicillium roquefortii, or Penicillium simplicissimum.

[0425] In some embodiments, the procedures and methods described here can be accomplished using a host cell that is a Kluyveromyces lactis, Kluyveromyces marxianus, Saccharomyces cerevisiae, or Pichia pastoris.

[0426] In some embodiments, the host cell used to produce a CRIP, a CRIP-insecticidal protein, or a peptide-IA, may be a fungi belonging to one of the following genera: Aspergillus, Cladosporium, Magnaporthe, Morchella, Neurospora, Penicillium, Saccharomyces, Cryptococcus, or Ustilago.

[0427] In some embodiments, the host cell used to produce a CRIP, a CRIP-insecticidal protein, or a peptide-IA may be a member of the Saccharomycetaceae family. For example, in some embodiments, the host cell may be one of the following genera within the Saccharomycetaceae family: Brettanomyces, Candida, Citeromyces, Cyniclomyces, Debaryomyces, Issatchenkia, Kazachstania, Kluyveromyces, Komagataella, Kuraishia, Lachancea, Lodderomyces, Nakaseomyces, Pachysolen, Pichia, Saccharomyces, Spathaspora, Tetrapisispora, Vanderwaltozyma, Torulaspora, Williopsis, Zygosaccharomyces, or Zygotorulaspora.

[0428] In some embodiments, the host cell used to produce a CRIP, a CRIP-insecticidal protein, or a peptide-IA, may be one of the following: Aspergillus flavus, Aspergillus terreus, Aspergillus awamori, Cladosporium elatum, Cladosporium Herbarum, Cladosporium Sphaerospermum, Cladosporium cladosporioides, Magnaporthe grisea, Magnaporthe oryzae, Magnaporthe rhizophila, Morchella deliciosa, Morchella esculenta, Morchella conica, Neurospora crassa, Neurospora intermedia, Neurospora tetrasperma, Penicillium notatum, Penicillium chrysogenum, Penicillium roquefortii, or Penicillium simplicissimum.

[0429] In some embodiments, the host cell used to produce a CRIP, a CRIP-insecticidal protein, or a peptide-IA, may be a species within the Candida genus. For example, the host cell may be one of the following: Candida albicans, Candida ascalaphidarum, Candida amphixiae, Candida antarctica, Candida argentea, Candida atlantica, Candida atmosphaerica, Candida auris, Candida blankii, Candida blattae, Candida bracarensis, Candida bromeliacearum, Candida carpophila, Candida carvajalis, Candida cerambycidarum, Candida chauliodes, Candida corydalis, Candida dosseyi, Candida dubliniensis, Candida ergatensis, Candida fructus, Candida glabrata, Candida fermentati, Candida guilliermondii, Candida haemulonii, Candida humilis, Candida insectamens, Candida insectorum, Candida intermedia, Candida jeffresii, or Candida kefyr.

[0430] In some embodiments, the host cell used to produce a CRIP, a CRIP-insecticidal protein, or a peptide-IA, may be a species within the Kluyveromyces genus. For example, the host cell may be one of the following: Kluyveromyces aestuarii, Kluyveromyces dobzhanskii, Kluyveromyces lactis, Kluyveromyces marxianus, Kluyveromyces nonfermentans, or Kluyveromyces wickerhamii.

[0431] In some embodiments, the host cell used to produce a CRIP, a CRIP-insecticidal protein, or a peptide-IA, may be a species within the Pichia genus. For example, the host cell may be one of the following: Pichia farinose, Pichia anomala, Pichia heedii, Pichia guilhermondii, Pichia kluyveri, Pichia membranifaciens, Pichia norvegensis, Pichia ohmeri, Pichia pastoris, Pichia methanolica, or Pichia subpelliculosa.

[0432] In some embodiments, the host cell used to produce a CRIP, a CRIP-insecticidal protein, or a peptide-IA, may be a species within the Saccharomyces genus. For example, the host cell may be one of the following: Saccharomyces arboricolus, Saccharomyces bayanus, Saccharomyces bulderi, Saccharomyces cariocanus, Saccharomyces cariocus, Saccharomyces cerevisiae, Saccharomyces cerevisiae var boulardii, Saccharomyces chevalieri, Saccharomyces dairenensis, Saccharomyces elhpsoideus, Saccharomyces eubayanus, Saccharomyces exiguous, Saccharomyces florentinus, Saccharomyces fragilis, Saccharomyces kudriavzevii, Saccharomyces martiniae, Saccharomyces mikatae, Saccharomyces monacensis, Saccharomyces norbensis, Saccharomyces paradoxus, Saccharomyces pastorianus, Saccharomyces spencerorum, Saccharomyces turicensis, Saccharomyces unisporus, Saccharomyces uvarum, or Saccharomyces zonatus.

[0433] In some embodiments, the host cell used to produce a CRIP, a CRIP-insecticidal protein, or a peptide-IA, may be one of the following: Saccharomyces cerevisiae, Pichia pastoris, Pichia methanolica, Schizosaccharomyces pombe, or Hansenula anomala.

[0434] The use of yeast cells as a host organism to generate recombinant CRIPs or peptide-IAs is an exceptional method, well known to those having ordinary skill in the art. In some embodiments, the methods and compositions described herein can be performed with any species of yeast, including but not limited to any species of the genus Saccharomyces, Pichia, Kluyveromyces, Hansenula, Yarrowia or Schizosaccharomyces and the species Saccharomyces includes any species of Saccharomyces, for example Saccharomyces cerevisiae species selected from following strains: INVSc1, YNN27, S150-2B, W303-1B, CG25, W3124, JRY188, BJ5464, AH22, GRF18, W303-1A and BJ3505. In some embodiments, members of the Pichia species including any species of Pichia, for example the Pichia species, Pichia pastoris, for example, the Pichia pastoris is selected from following strains: Bg08, Y-11430, X-33, GS115, GS190, JC220, JC254, GS200, JC227, JC300, JC301, JC302, JC303, JC304, JC305, JC306, JC307, JC308, YJN165, KM71, MC100-3, SMD1163, SMD1165, SMD1168, GS241, MS105, any pep4 knock-out strain and any prb1 knock-out strain, as well as Pichia pastoris selected from following strains: Bg08, X-33, SMD1168 and KM71. In some embodiments, any Kluyveromyces species can be used to accomplish the methods described here, including any species of Kluyveromyces, for example, Kluyveromyces lactis, and we teach that the stain of Kluyveromyces lactis can be but is not required to be selected from following strains: GG799, YCT306, YCT284, YCT389, YCT390, YCT569, YCT598, NRRL Y-1140, MW98-8C, MS1, CBS293.91, Y721, MD2/1, PM6-7A, WM37, K6, K7, 22AR1, 22A295-1, SD11, MG1/2, MSK110, JA6, CMKS, HP101, HP108 and PM6-3C, in addition to Kluyveromyces lactis species is selected from GG799, YCT306 and NRRL Y-1140.

[0435] In some embodiments, the host cell used to produce a CRIP, a CRIP-insecticidal protein, or a peptide-IA, can be an Aspergillus oryzae.

[0436] In some embodiments, the host cell used to produce a CRIP, a CRIP-insecticidal protein, or a peptide-IA, can be an Aspergillus japonicas.

[0437] In some embodiments, the host cell used to produce a CRIP, a CRIP-insecticidal protein, or a peptide-IA, can be an Aspergillus niger.

[0438] In some embodiments, the host cell used to produce a CRIP, a CRIP-insecticidal protein, or a peptide-IA, can be a Bacillus licheniformis.

[0439] In some embodiments, the host cell used to produce a CRIP, a CRIP-insecticidal protein, or a peptide-IA, can be a Bacillus subtilis.

[0440] In some embodiments, the host cell used to produce a CRIP, a CRIP-insecticidal protein, or a peptide-IA, can be a Trichoderma reesei.

[0441] In some embodiments, the procedures and methods described here can be accomplished using a host cell that is a yeast, including but not limited to any species of Hansenula species including any species of Hansenula and preferably Hansenula polymorpha. In some embodiments, the procedures and methods described here can be accomplished with any species of yeast, including but not limited to any species of Yarrowia species for example, Yarrowia lipolytica. In some embodiments, the procedures and methods described here can be accomplished with any species of yeast, including but not limited to any species of Schizosaccharomyces species including any species of Schizosaccharomyces and preferably Schizosaccharomyces pombe.

[0442] Yeast Cell Culture

[0443] In some embodiments, yeast species such as Kluyveromyces lactis, Saccharomyces cerevisiae, Pichia pastoris, and others, can be used as a host organism. Yeast cell culture techniques are well known to those having ordinary skill in the art. Exemplary methods of yeast cell culture can be found in Evans, Yeast Protocols. Springer (1996); Bill, Recombinant Protein Production in Yeast. Springer (2012); Hagan et al., Fission Yeast: A Laboratory Manual, CSH Press (2016); Konishi et al., Improvement of the transformation efficiency of Saccharomyces cerevisiae by altering carbon sources in pre-culture. Biosci Biotechnol Biochem. 2014; 78(6):1090-3; Dymond, Saccharomyces cerevisiae growth media. Methods Enzymol. 2013; 533:191-204; Looke et al., Extraction of genomic DNA from yeasts for PCR-based applications. Biotechniques. 2011 May; 50(5):325-8; and Romanos et al., Culture of yeast for the production of heterologous proteins. Curr Protoc Cell Biol. 2014 Sep. 2; 64:20.9.1-16, the disclosure of which is incorporated herein by reference in its entirety.

[0444] Recipes for yeast cell fermentation media and stocks are described as follows: (1) MSM media recipe: 2 g/L sodium citrate dihydrate; 1 g/L calcium sulfate dihydrate (0.79 g/L anhydrous calcium sulfate); 42.9 g/L potassium phosphate monobasic; 5.17 g/L ammonium sulfate; 14.33 g/L potassium sulfate; 11.7 g/L magnesium sulfate heptahydrate; 2 mL/L PTM1 trace salt solution; 0.4 ppm biotin (from 500×, 200 ppm stock); 1-2% pure glycerol or other carbon source. (2) PTM1 trace salts solution: Cupric sulfate-5H₂O 6.0 g; Sodium iodide 0.08 g; Manganese sulfate-H₂O 3.0 g; Sodium molybdate-2H₂O 0.2 g; Boric Acid 0.02 g; Cobalt chloride 0.5 g; Zinc chloride 20.0 g; Ferrous sulfate-7H₂O 65.0 g; Biotin 0.2 g; Sulfuric Acid 5.0 ml; add Water to a final volume of 1 liter. An illustrative composition for K. lactis defined medium (DMSor) is as follows: 11.83 g/L KH₂PO₄, 2.299 g/L K2HPO₄, 20 g/L of a fermentable sugar, e.g., galactose, maltose, latotriose, sucrose, fructose or glucose and/or a sugar alcohol, for example, erythritol, hydrogenated starch hydrolysates, isomalt, lactitol, maltitol, mannitol, and xylitol, 1 g/L MgSO₄·7H₂O, 10 g/L (NH₄)₅O₄, 0.33 g/L CaCl₂·2H₂O, 1 g/L NaCl, 1 g/L KCl, 5 mg/L CuSO₄·5H₂O, 30 mg/L MnSO₄·H₂O, 10 mg/L, ZnCl₂, 1 mg/L KI, 2 mg/L CoCl₂·6H₂O, 8 mg/L Na₂MoO₄·2H₂O, 0.4 mg/L H₃BO₃, 15 mg/L FeCl₃·6H₂O, 0.8 mg/L biotin, 20 mg/L Ca-pantothenate, 15 mg/L thiamine, 16 mg/L myo-inositol, 10 mg/L nicotinic acid, and 4 mg/L pyridoxine.

[0445] Yeast cells can be cultured in 48-well Deep-well plates, sealed after inoculation with sterile, air-permeable cover. Colonies of yeast, for example, K. lactis cultured on plates can be picked and inoculated the deep-well plates with 2.2 mL media per well, composed of DMSor. Inoculated deep-well plates can be grown for 6 days at 23.5° C. with 280 rpm shaking in a refrigerated incubator-shaker. On day 6 post-inoculation, conditioned media should be harvested by centrifugation at 4000 rpm for 10 minutes, followed by filtration using filter plate with 0.22 μM membrane, with filtered media are subject to HPLC analyses.

[0446] Yeast Transformation, Peptide Purification, and Analysis

[0447] An exemplary method of yeast transformation is as follows: the expression vectors carrying a CRIP ORF, a CRIP-insecticidal protein ORF, or a peptide-IA ORF, are transformed into yeast cells. First, the expression vectors are usually linearized by specific restriction enzyme cleavage to facilitate chromosomal integration via homologous recombination. The linear expression vector is then transformed into yeast cells by a chemical or electroporation method of transformation and integrated into the targeted locus of the yeast genome by homologous recombination. The integration can happen at the same chromosomal locus multiple times; therefore, the genome of a transformed yeast cell can contain multiple copies of CRIP or peptide-IA expression cassettes. The successfully transformed yeast cells can be identified using growth conditions that favor a selective marker engineered into the expression vector and co-integrated into yeast chromosomes with the CRIP, CRIP-insecticidal protein, or peptide-IA ORF; examples of such markers include, but are not limited to, acetamide prototrophy, zeocin resistance, geneticin resistance, nourseothricin resistance, and uracil prototrophy.

[0448] Due to the influence of unpredictable and variable factors—such as epigenetic modification of genes and networks of genes, and variation in the number of integration events that occur in individual cells in a population undergoing a transformation procedure—individual yeast colonies of a given transformation process will differ in their capacities to produce a CRIP ORF, a CRIP-insecticidal protein ORF, or a peptide-IA ORF. Therefore, transgenic yeast colonies carrying the CRIP or peptide-IA transgenes should be screened for high yield strains. Two effective methods for such screening—each dependent on growth of small-scale cultures of the transgenic yeast to provide conditioned media samples for subsequent analysis—use reverse-phase HPLC or housefly injection procedures to analyze conditioned media samples from the positive transgenic yeast colonies.

[0449] The transgenic yeast cultures can be performed using 14 mL round bottom polypropylene culture tubes with 5 to 10 mL defined medium added to each tube, or in 48-well deep well culture plates with 2.2 mL defined medium added to each well. The defined medium, not containing crude proteinaceous extracts or by-products such as yeast extract or peptone, is used for the cultures to reduce the protein background in the conditioned media harvested for the later screening steps. The cultures are performed at the optimal temperature, for example, 23.5° C. for K. lactis, for about 5-6 days, until the maximum cell density is reached. CRIPs or peptide-IAs will now be produced by the transformed yeast cells and secreted out of cells to the growth medium. To prepare samples for the screening, cells are removed from the cultures by centrifugation and the supernatants are collected as the conditioned media, which are then cleaned by filtration through 0.22 μm filter membrane and then made ready for strain screening.

[0450] In some embodiments, positive yeast colonies transformed with CRIP or peptide-IA can be screened via reverse-phase HPLC (rpHPLC) screening of putative yeast colonies. In this screening method, an HPLC analytic column with bonded phase of C18 can be used. Acetonitrile and water are used as mobile phase solvents, and a UV absorbance detector set at 220 nm is used for the peptide detection. Appropriate amounts of the conditioned medium samples are loaded into the rpHPLC system and eluted with a linear gradient of mobile phase solvents. The corresponding peak area of the insecticidal peptide in the HPLC chromatograph is used to quantify the CRIP or peptide-IA concentrations in the conditioned media. Known amounts of pure CRIP or peptide-IA are run through the same rpHPLC column with the same HPLC protocol to confirm the retention time of the peptide and to produce a standard peptide HPLC curve for the quantification.

[0451] An exemplary reverse-phase HPLC screening process of positive K. lactis cells is as follows: a CRIP ORF, a CRIP-insecticidal protein ORF, or a peptide-IA ORF, can be inserted into the expression vector, pKLAC1, and transformed into the K. lactis strain, YCT306, from New England Biolabs, Ipswich, MA, USA. pKLAC1 vector is an integrative expression vector. Once the CRIP or peptide-IA transgenes were cloned into pKLAC1 and transformed into YCT306, their expression was controlled by the LAC4 promoter. The resulting transformed colonies produced pre-propeptides comprising an α-mating factor signal peptide, a Kex2 cleavage site and mature CRIPs or peptide-IAs. The α-Mating factor signal peptide guides the pre-propeptides to enter the endogenous secretion pathway, and mature CRIP or peptide-IAs are released into the growth media.

[0452] In some embodiments, codon optimization for CRIP or peptide-IA expression can be performed in two rounds, for example, in the first round, based on some common features of high expression DNA sequences, multiple variants of the CRIP or peptide-IA expression ORF, expressing an α-Mating factor signal peptide, a Kex2 cleavage site and the CRIP or peptide-IA, are designed and their expression levels are evaluated in the YCT306 strain of K. lactis, resulting in an initial K. lactis expression algorithm; in a second round of optimization, additional variant CRIP or peptide-IA expression ORFs can be designed based on the initial K. lactis expression algorithm to further fine-tuned the K. lactis expression algorithm, and identify the best ORF for CRIP or peptide-IA expression in K. lactis. In some embodiments, the resulting DNA sequence from the foregoing optimization can have an open reading frame encoding an α-MF signal peptide, a Kex2 cleavage site and a CRIP, a CRIP-insecticidal protein, or a peptide-IA, which can be cloned into the pKLAC1 vector using Hind III and Not I restriction sites, resulting in CRIP or peptide-IA expression vectors.

[0453] In some embodiments, the yeast, Pichia pastoris, can be transformed with a CRIP, a CRIP-insecticidal protein, or a peptide-IA, expression cassette. An exemplary method for transforming P. pastoris is as follows: the vectors, pJUGαKR and pJUZαKR, can be used to transform the CRIP or peptide-IA into P. pastoris. The pJUGαKR and pJUZαKR vectors are available from Biogrammatics, Carlsbad, California, USA. Both vectors are integrative vectors and use the uracil phosphoribosyltransferase promoter (pUPP) to enhance the heterologous transgene expression. The only difference between the vectors is that pJUGαKR provides G418 resistance to the host yeast, while pJUZαKR provides Zeocin resistance. Pairs of complementary oligonucleotides, encoding the CRIP or peptide-IA are designed and synthesized for subcloning into the two yeast expression vectors. Hybridization reactions are performed by mixing the corresponding complementary oligonucleotides to a final concentration of 20 μM in 30 mM NaCl, 10 mM Tris-Cl (all final concentrations), pH 8, and then incubating at 95° C. for 20 min, followed by a 9-hour incubation starting at 92° C. and ending at 17° C., with 3° C. drops in temperature every 20 min. The hybridization reactions will result in DNA fragments encoding CRIP or peptide-IA. The two P. pastoris vectors are digested with BsaI-HF restriction enzymes, and the double stranded DNA products of the reactions are then subcloned into the linearized P. pastoris vectors using standard procedures. Following verification of the sequences of the subclones, plasmid aliquots are transfected by electroporation into the P. pastoris strain, Bg08. The resulting transformed yeast, selected based on resistance to Zeocin or G418 conferred by elements engineered into vectors pJUZαKR and pJUGαKR, respectively, can be cultured and screened as described herein.

[0454] A detailed description of ORFs and the components thereof is provided below.

[0455] Yeast Peptide Yield Screening and Evaluation

[0456] Peptide yield can be determined by any of the methods known to those of skill in the art (e.g., capillary gel electrophoresis (CGE), Western blot analysis, and the like). Activity assays, as described herein and known in the art, can also provide information regarding peptide yield. In some embodiments, these or any other methods known in the art can be used to evaluate peptide yield.

[0457] Quantification Assays

[0458] In some embodiments, and without limitation, CRIP peptide yield can be measured using: HPLC; Mass spectrometry (MS) and related techniques; LC/MS/MS; reverse phase protein arrays (RPPA); immunohistochemistry; ELISA; suspension bead array, mass spectrometry; dot blot; SDS-PAGE; capillary gel electrophoresis (CGE); Western blot analysis; Bradford assay; measuring UV absorption at 260 nm; Lowry assay; Smith copper/bicinchoninic assay; a secretion assay; Pierce protein assay; Biuret reaction; and the like. Exemplary methods of protein quantification are provided in Stoscheck, C. 1990 “Quantification of Protein” Methods in Enzymology, 182:50-68; Lowry, O. Rosebrough, A., Farr, A. and Randall, R. 1951 J. Biol. Chem. 193:265; Smith, P. et al., (1985) Anal. Biochem. 150:76-85; Bradford, M. 1976 “A Rapid and Sensitive Method for the Quantitation of Microgram Quantities of Protein Utilizing the Principle of Protein-Dye Binding” Anal. Biochem. 72:248-254; Cabib, E. and Polacheck, I. 1984 “Protein assay for dilute solutions.” Methods in Enzymology, 104:318-328; Turcanu, Victor; Williams, Neil A. (2001). “Cell identification and isolation on the basis of cytokine secretion: A novel tool for investigating immune responses.” Nature Medicine. 7 (3): 373-376; U.S. Pat. No. 6,391,649; the disclosures of which are incorporated herein by reference in their entireties.

[0459] In other embodiments, CRIP peptide yield can be quantified and/or assessed using methods that include, without limitation: recombinant protein mass per volume of culture (e.g., gram or milligrams protein per liter culture); percent or fraction of recombinant protein insoluble precipitate obtained after cell lysis determined in (e.g., recombinant protein extracted supernatant in an amount/amount of protein in the insoluble components); percentage or fraction of active protein (e.g., an amount/analysis of the active protein for use in protein amount); total cell protein (tcp) percentage or fraction; and/or the amount of protein/cell and the dry biomass of a percentage or ratio.

[0460] In some embodiments, wherein yield is expressed in terms of culture volume, the culture cell density may be taken into account, particularly when yields between different cultures are being compared.

[0461] In some embodiments, the present invention provides a method of producing a heterologous polypeptide that is at least about 5%, at least about 10%, about 15%, about 20%, about 25%, about 30%, about 40%, about 45%, about 50%, about 55%, about 60%, about 65%, about 70%, about 75%, or greater of total cell protein (tcp). “Percent total cell protein” is the amount of heterologous polypeptide in the host cell as a percentage of aggregate cellular protein. The determination of the percent total cell protein is well known in the art.

[0462] “Total cell protein (tcp)” or “Percent total cell protein (% tcp)” is the amount of protein or polypeptide in the host cell as a percentage of aggregate cellular protein. Methods for the determination of the percent total cell protein are well known in the art.

[0463] In some embodiments, HPLC can be used to quantify peptide yield. For example, in some embodiments, CRIP or peptide-IA yield can be evaluated using an Agilent 1100 HPLC system equipped with an Onyx monolithic 4.5×100 mm, C18 reverse-phase analytical HPLC column and an auto-injector. An illustrative use of the Agilent 1100 HPLC system equipped with an Onyx monolithic 4.5×100 mm, C18 reverse-phase analytical HPLC column and an auto-injector is as follows: filtered conditioned media samples from transformed K. lactis cells are analyzed using Agilent 1100 HPLC system equipped with an Onyx monolithic 4.5×100 mm, C18 reverse-phase analytical HPLC column and an auto-injector by analyzing HPLC grade water and acetonitrile containing 0.1% trifluoroacetic acid, constituting the two mobile phase solvents used for the HPLC analyses; the peak areas of both the CRIP or peptide-IA are analyzed using HPLC chromatographs, and then used to calculate the peptide concentration in the conditioned media, which can be further normalized to the corresponding final cell densities (as determined by OD600 measurements) as normalized peptide yield.

[0464] Activity Assays

[0465] In some embodiments, positive yeast colonies transformed with a CRIP or a peptide-IA can be screened using a housefly injection assay. The CRIP or peptide-IA can paralyze/kill houseflies when injected in measured doses through the body wall of the dorsal thorax. The efficacy of the CRIP or peptide-IA can be defined by the median paralysis/lethal dose of the peptide (PD₅₀/LD₅₀), which causes 50% knock-down ratio or mortality of the injected houseflies respectively. The pure CRIP or peptide-IA is normally used in the housefly injection assay to generate a standard dose-response curve, from which a PD₅₀/LD₅₀ value can be determined. Using a PD₅₀/LD₅₀ value from the analysis of a standard dose-response curve of the pure CRIP or peptide-IA, quantification of the CRIP or peptide-IA produced by the transformed yeast can be achieved using a housefly injection assay performed with serial dilutions of the corresponding conditioned media.

[0466] An exemplary housefly injection bioassay is as follows: conditioned media is serially diluted to generate full dose-response curves from the housefly injection bioassay. Before injection, adult houseflies (Musca domestica) are immobilized with CO₂, and 12-18 mg houseflies are selected for injection. A microapplicator, loaded with a 1 cc syringe and 30-gauge needle, is used to inject 0.5 μL per fly, doses of serially diluted conditioned media samples into houseflies through the body wall of the dorsal thorax. The injected houseflies are placed into closed containers with moist filter paper and breathing holes on the lids, and they are examined by knock-down ratio or by mortality scoring at 24 hours post-injection. Normalized yields are calculated. Peptide yield means the peptide concentration in the conditioned media in units of mg/L. However, peptide yields are not always sufficient to accurately compare the strain production rate. Individual strains may have different growth rates, hence when a culture is harvested, different cultures may vary in cell density. A culture with a high cell density may produce a higher concentration of the peptide in the media, even though the peptide production rate of the strain is lower than another strain which has a higher production rate. Accordingly, the term “normalized yield” is created by dividing the peptide yield with the cell density in the corresponding culture and this allows a better comparison of the peptide production rate between strains. The cell density is represented by the light absorbance at 600 nm with a unit of “A” (Absorbance unit).

[0467] Screening yeast colonies that have undergone a transformation with CRIP or peptide-IA can identify the high yield yeast strains from hundreds of potential colonies. These strains can be fermented in bioreactor to achieve at least up to 4 g/L or at least up to 3 g/L or at least up to 2 g/L yield of the CRIP or peptide-IA when using optimized fermentation media and fermentation conditions described herein. The higher rates of production (expressed in mg/L) can be anywhere from about 100 mg/L to about 100,000 mg/L; or from about 100 mg/L to about 90,000 mg/L; or from about 100 mg/L to about 80,000 mg/L; or from about 100 mg/L to about 70,000 mg/L; or from about 100 mg/L to about 60,000 mg/L; or from about 100 mg/L to about 50,000 mg/L; or from about 100 mg/L to about 40,000 mg/L; or from about 100 mg/L to about 30,000 mg/L; or from about 100 mg/L to about 20,000 mg/L; or from about 100 mg/L to about 17,500 mg/L; or from about 100 mg/L to about 15,000 mg/L; or from about 100 mg/L to about 12,500 mg/L; or from about 100 mg/L to about 10,000 mg/L; or from about 100 mg/L to about 9,000 mg/L; or from about 100 mg/L to about 8,000 mg/L; or from about 100 mg/L to about 7,000 mg/L; or from about 100 mg/L to about 6,000 mg/L; or from about 100 mg/L to about 5,000 mg/L; or from about 100 mg/L to about 3,000 mg/L; or from about 100 mg/L to 2,000 mg/L; or from about 100 mg/L to 1,500 mg/L; or from about 100 mg/L to 1,000 mg/L; or from about 100 mg/L to 750 mg/L; or from about 100 mg/L to 500 mg/L; or from about 150 mg/L to 100,000 mg/L; or from about 200 mg/L to 100,000 mg/L; or from about 300 mg/L to 100,000 mg/L; or from about 400 mg/L to 100,000 mg/L; or from about 500 mg/L to 100,000 mg/L; or from about 750 mg/L to 100,000 mg/L; or from about 1,000 mg/L to 100,000 mg/L; or from about 1,250 mg/L to 100,000 mg/L; or from about 1,500 mg/L to 100,000 mg/L; or from about 2,000 mg/L to 100,000 mg/L; or from about 2,500 mg/L to 100,000 mg/L; or from about 3,000 mg/L to 100,000 mg/L; or from about 3,500 mg/L to 100,000 mg/L; or from about 4,000 mg/L to 100,000 mg/L; or from about 4,500 mg/L to 100,000 mg/L; or from about 5,000 mg/L to 100,000 mg/L; or from about 6,000 mg/L to 100,000 mg/L; or from about 7,000 mg/L to 100,000 mg/L; or from about 8,000 mg/L to 100,000 mg/L; or from about 9,000 mg/L to 100,000 mg/L; or from about 10,000 mg/L to 100,000 mg/L; or from about 12,500 mg/L to 100,000 mg/L; or from about 15,000 mg/L to 100,000 mg/L; or from about 17,500 mg/L to 100,000 mg/L; or from about 20,000 mg/L to 100,000 mg/L; or from about 30,000 mg/L to 100,000 mg/L; or from about 40,000 mg/L to 100,000 mg/L; or from about 50,000 mg/L to 100,000 mg/L; or from about 60,000 mg/L to 100,000 mg/L; or from about 70,000 mg/L to 100,000 mg/L; or from about 80,000 mg/L to 100,000 mg/L; or from about 90,000 mg/L to 100,000 mg/L; or any range of any value provided or even greater yields than can be achieved with a peptide before conversion, using the same or similar production methods that were used to produce the peptide before conversion.

[0468] Any of the foregoing methods can be used and/or tailored to produce a CRIP and/or peptide-IA (e.g., an Insecticidal Agent that lends itself to such methods, e.g., a polymer of amino acids, a peptide and/or a protein). For example, any of the foregoing methods can be used to produce, generate, make, express, transcribe, translate, synthesize or otherwise create, any of the CRIPs or peptide-IAs described herein, including, without limitation, ACTX peptides (e.g., U-ACTX-Hv1a, U+2-ACTX-Hv1a, rU-ACTX-Hv1a, rU-ACTX-Hv1b, rκ-ACTX-Hv1c, ω-ACTX-Hv1a, and/or ω-ACTX-Hv1a+2); Γ-CNTX-Pn1a; U1-agatoxin-Ta1b; TVPs; Av2; Av3; AVPs; and/or Bt toxins (e.g., Cry toxins, Cyt toxins, or Vips).

[0469] Culture and Fermentation Conditions

[0470] Cell culture techniques are well-known in the art. In some embodiments, the culture method and/or materials will necessarily require adaption based on the host cell selected; and, such adaptions (e.g., modifying pH, temperature, medium contents, and the like) are well known to those having ordinary skill in the art. In some embodiments, any known culture technique may be employed to produce a CRIP, a CRIP-insecticidal protein, or a peptide-IA of the present invention.

[0471] Exemplary culture methods are provided in U.S. Pat. Nos. 3,933,590; 3,946,780; 4,988,623; 5,153,131; 5,153,133; 5,155,034; 5,316,905; 5,330,908; 6,159,724; 7,419,801; 9,320,816; 9,714,408; and 10,563,169; the disclosures of which are incorporated herein by reference in their entireties.

[0472] Yeast Culture

[0473] Yeast cell culture techniques are well known to those having ordinary skill in the art. Exemplary methods of yeast cell culture can be found in Evans, Yeast Protocols. Springer (1996); Bill, Recombinant Protein Production in Yeast. Springer (2012); Hagan et al., Fission Yeast: A Laboratory Manual, CSH Press (2016); Konishi et al., Improvement of the transformation efficiency of Saccharomyces cerevisiae by altering carbon sources in pre-culture. Biosci Biotechnol Biochem. 2014; 78(6):1090-3; Dymond, Saccharomyces cerevisiae growth media. Methods Enzymol. 2013; 533:191-204; Looke et al., Extraction of genomic DNA from yeasts for PCR-based applications. Biotechniques. 2011 May; 50(5):325-8; and Romanos et al., Culture of yeast for the production of heterologous proteins. Cliff Protoc Cell Biol. 2014 Sep. 2; 64:20.9.1-16, the disclosure of which is incorporated herein by reference in its entirety.

[0474] Yeast can be cultured in a variety of media, e.g., in some embodiments, yeast can be cultured in minimal medium; YPD medium; yeast synthetic drop-out medium; Yeast Nitrogen Base (YNB with or without amino acids); YEPD medium; ADE D medium; ADE DS″ medium; LEU D medium; HIS D medium; or Mineral salts medium.

[0475] In some embodiments, yeast can be cultured in minimal medium. In some embodiments, minimal medium ingredients can comprise: 2% Sugar; Phosphate Buffer, pH 6.0; Magnesium Sulfate; Calcium Chloride; Ammonium Sulfate; Sodium Chloride; Potassium Chloride; Copper Sulfate; Manganese Sulfate; Zinc Chloride; Potassium Iodide; Cobalt Chloride; Sodium Molybdate; Boric Acid; Iron Chloride; Biotin; Calcium pantothenate; Thiamine; Myo-inositol; Nicotinic Acid; and Pyridoxine.

[0476] In some embodiments, yeast can be cultured in YPD medium. YPD medium comprises a bacteriological peptone, yeast extract, and glucose.

[0477] In some embodiments, yeast can be cultured in yeast synthetic drop-out medium, which can be used to differentiate auxotrophic mutant strains that cannot grow without a specific medium component transformed with a plasmid that allows said transformant to grow on a medium lacking the required component.

[0478] In some embodiments, yeast can be cultured using Yeast Nitrogen Base (YNB with or without amino acids), which comprises nitrogen, vitamins, trace elements, and salts.

[0479] In some embodiments, the medium can be YEPD medium, e.g., a medium comprising 2% D-glucose, 2% BACTO Peptone (Difco Laboratories, Detroit, MI), 1% BACTO yeast extract (Difco), 0.004% adenine, and 0.006% L-leucine; or, a variation thereof, wherein the carbon source is a sugar alcohol, e.g., glycerol or sorbitol

[0480] In some embodiments, the medium can be ADE D medium, e.g., a medium comprising 0.056%-Ade-Trp-Thr powder, 0.67% yeast nitrogen base without amino acids, 2% D-glucose, and 0.5% 200× tryptophan, threonine solution; or, a variation thereof, wherein the carbon source is a sugar alcohol, e.g., glycerol or sorbitol

[0481] In some embodiments, the medium can be ADE DS″ medium, e.g., a medium comprising 0.056%-Ade-Trp-Thr powder, 0.67% yeast nitrogen base without amino acids, 2% D-glucose, 0.5% 200× tryptophan, threonine solution, and 18.22% D-sorbitol; or, a variation thereof, wherein the carbon source is entirely a sugar alcohol, e.g., glycerol or sorbitol

[0482] In some embodiments, the medium can be LEU D medium e.g., a medium comprising 0.052%-Leu-Trp-Thr powder, 0.67% yeast nitrogen base without amino acids, 2% D-glucose, and 0.5% 200× tryptophan, threonine solution; or, a variation thereof, wherein the carbon source is a sugar alcohol, e.g., glycerol or sorbitol.

[0483] In some embodiments, the medium can be HIS D medium, e.g., a medium comprising 0.052%-His-Trp-Thr powder, 0.67% yeast nitrogen base without amino acids, 2% D-glucose, and 0.5% 200× tryptophan, threonine solution; or, a variation thereof, wherein the carbon source is a sugar alcohol, e.g., glycerol or sorbitol.

[0484] In some embodiments, a mineral salts medium can be used. Mineral salts media consists of mineral salts and a carbon source such as, e.g., glucose, sucrose, or glycerol. Examples of mineral salts media include, e.g., M9 medium, Pseudomonas medium (ATCC 179), and Davis and Mingioli medium. See, Davis & Mingioli (1950) J. Bact. 60:17-28. The mineral salts used to make mineral salts media include those selected from among, e.g., potassium phosphates, ammonium sulfate or chloride, magnesium sulfate or chloride, and trace minerals such as calcium chloride, borate, and sulfates of iron, copper, manganese, and zinc. Typically, no organic nitrogen source, such as peptone, tryptone, amino acids, or a yeast extract, is included in a mineral salts medium. Instead, an inorganic nitrogen source is used and this may be selected from among, e.g., ammonium salts, aqueous ammonia, and gaseous ammonia. A mineral salts medium will typically contain glucose or glycerol as the carbon source.

[0485] In comparison to mineral salts media, minimal media can also contain mineral salts and a carbon source, but can be supplemented with, e.g., low levels of amino acids, vitamins, peptones, or other ingredients, though these are added at very minimal levels. Media can be prepared using the methods described in the art, e.g., in U.S. Pat. App. Pub. No. 2006/0040352, the disclosure of which is incorporated herein by reference in its entirety. Details of cultivation procedures and mineral salts media useful in the methods of the present invention are described by Riesenberg, D et al., 1991, “High cell density cultivation of Escherichia coli at controlled specific growth rate,” J. Biotechnol. 20 (1):17-27.

[0486] In some embodiments, Kluyveromyces lactis are grown in minimal media supplemented with 2% glucose, galactose, sorbitol, or glycerol as the sole carbon source. Cultures are incubated at 30° C. until mid-log phase (24-48 hours) for β-galactosidase measurements, or for 6 days at 23.5° C. for heterologous protein expression.

[0487] In some embodiments, yeast cells can be cultured in 48-well Deep-well plates, sealed after inoculation with sterile, air-permeable cover. Colonies of yeast, for example, K. lactis cultured on plates can be picked and inoculated the deep-well plates with 2.2 mL media per well, composed of DMSor. Inoculated deep-well plates can be grown for 6 days at 23.5° C. with 280 rpm shaking in a refrigerated incubator-shaker. On day 6 post-inoculation, conditioned media should be harvested by centrifugation at 4000 rpm for 10 minutes, followed by filtration using filter plate with 0.22 μM membrane, with filtered media are subject to HPLC analyses.

[0488] In some embodiments, yeast species such as Kluyveromyces lactis, Saccharomyces cerevisiae, Pichia pastoris, and others, can be used as a host organism, and/or the yeast to be modified using the methods described herein.

[0489] Temperature and pH conditions will vary depending on the stage of culture and the host cell species selected. Variables such as temperature and pH in cell culture are readily known to those having ordinary skill in the art.

[0490] The pH level is important in the culturing of yeast. One of skill in the art will appreciate that the culturing process includes not only the start of the yeast culture but the maintenance of the culture as well. The yeast culture may be started at any pH level, however, since the media of a yeast culture tends to become more acidic (i.e., lowering the pH) over time, care must be taken to monitor the pH level during the culturing process.

[0491] In some embodiments of the invention, the yeast is grown in a medium at a pH level that is dictated based on the species of yeast used, the stage of culture, and/or the temperature. Thus, in some embodiments, the pH level can fall within a range from about 2 to about 10. Those having ordinary skill in the art will recognize that the optimum pH for most microorganisms is near the neutral point (pH 7.0). However, in some embodiments, some fungal species prefer an acidic environment: accordingly, in some embodiments, the pH can range from 2 to 6.5. In some embodiments, the pH can range from about 4 to about 4.5. Some fungal species (e.g., molds) can grow can grow in a pH of from about 2 to about 8.5, but favor an acid pH. See Mountney & Gould, Practical food microbiology and technology. 1988. Ed. 3; and Pena et al., Effects of high medium pH on growth, metabolism and transport in Saccharomyces cerevisiae. FEMS Yeast Res. 2015 March; 15(2):fou005.

[0492] In other embodiments, the pH is about 5.7 to 5.9, 5.8 to 6.0, 5.9 to 6.1, 6.0 to 6.2, 6.1 to 6.3, 6.2 to 6.5, 6.4 to 6.7, 6.5 to 6.8, 6.6 to 6.9, 6.7 to 7.0, 6.8 to 7.1, 6.9 to 7.2, 7.0 to 7.3, 7.1 to 7.4, 7.2 to 7.5, 7.3 to 7.6, 7.4 to 7.7, 7.5 to 7.8, 7.6 to 7.9, 7.7 to 8.0, 7.8 to 8.1, 7.9 to 8.2, 8.0 to 8.3, 8.1 to 8.4, 8.2 to 8.5, 8.3 to 8.6, 8.4 to 8.7, or 8.5 to 8.8.

[0493] In some embodiments, the pH of the medium can be at least 5.5. In other aspects, the medium can have a pH level of about 5.5. In other aspects, the medium can have a pH level of between 4 and 8. In some cases, the culture is maintained at a pH level of between 5.5 and 8. In other aspects, the medium has a pH level of between 6 and 8. In some cases, medium has a pH level that is maintained at a pH level of between 6 and 8. In some embodiments, the yeast is grown and/or maintained at a pH level of between 6.1 and 8.1. In some embodiments, the yeast is grown and/or maintained at a pH level of between 6.2 and 8.2. In some embodiments, the yeast is grown and/or maintained at a pH level of between 6.3 and 8.3. In some embodiments, the yeast is grown and/or maintained at a pH level of between 6.4 and 8.4. In some embodiments, the yeast is grown and/or maintained at a pH level of between 5.5 and 8.5. In some embodiments, the yeast is grown and/or maintained at a pH level of between 6.5 and 8.5. In some embodiments, the yeast is grown at a pH level of about 5.6, 5.7, 5.8 or 5.9. In some embodiments, the yeast is grown at a pH level of about 6. In some embodiments, the yeast is grown at a pH level of about 6.5. In some embodiments, the yeast is grown at a pH level of about 6, 6.1, 6.2, 6.3, 6.4, 6.5, 6.6, 6.7, 6.8, 6.9 or 7.0. In some embodiments, the yeast is grown at a pH level of about 7, 7.1, 7.2, 7.3, 7.4, 7.5, 7.6, 7.7, 7.8, 7.9, or 8.0. In some embodiments, the yeast is grown at a level of above 8.

[0494] In some embodiments, the pH of the medium can range from a pH of 2 to 8.5. In certain embodiments, the pH is about 4.0, 4.1, 4.2, 4.3, 4.4, 4.5, 4.6, 4.7, 4.8, 4.9, 5.0, 5.1, 5.2, 5.3, 5.4, 5.5, 5.6, 5.7, 5.8, 5.9, 6.0, 6.1, 6.2, 6.3, 6.4, 6.5, 6.6, 6.7, 6.8, 6.9, 7.0, 7.1, 7.2, 7.3, 7.4, 7.5, 7.6, 7.7, 7.8, 7.9, 8.0, 8.1, 8.2, 8.3, 8.4, 8.5, 8.6, 8.7, or 8.8.

[0495] Exemplary methods of yeast culture can be found in U.S. Pat. No. 5,436,136, entitled “Repressible yeast promoters” (filed Dec. 20, 1991; assignee Ciba-Geigy Corporation); U.S. Pat. No. 6,645,739, entitled “Yeast expression systems, methods of producing polypeptides in yeast, and compositions relating to same” (filed Jul. 26, 2001; assignee Phoenix Pharmacologies, Inc., Lexington, KY); and U.S. Pat. No. 10,023,836, entitled “Medium for yeasts” (filed Aug. 23, 2013; assignee Yamaguchi University); the disclosures of which are incorporated herein by reference in their entirety.

[0496] Fermentation

[0497] The present invention contemplates the culture of host organisms in any fermentation format. For example, batch, fed-batch, semi-continuous, and continuous fermentation modes may be employed herein.

[0498] Fermentation may be performed at any scale. The methods and techniques contemplated according to the present invention are useful for recombinant protein expression at any scale. Thus, in some embodiments, e.g., microliter-scale, milliliter scale, centiliter scale, and deciliter scale fermentation volumes may be used, and 1 Liter scale and larger fermentation volumes can be used.

[0499] In some embodiments, the fermentation volume is at or above about 1 Liter. For example, in some embodiments, the fermentation volume is about 1 liter to about 100 liters. In some embodiments, the fermentation volume is about 1 liter, about 2 liters, about 3 liters, about 4 liters, about 5 liters, about 6 liters, about 7 liters, about 8 liters, about 9 liters, or about 10 liters. In some embodiments, the fermentation volume is about 1 liter to about 5 liters, about 1 liter to about 10 liters, about 1 liter to about 25 liters, about 1 liter to about 50 liters, about 1 liter to about 75 liters, about 10 liters to about 25 liters, about 25 liters to about 50 liters, or about 50 liters to about 100 liters In other embodiments, the fermentation volume is at or above 5 Liters, 10 Liters, 15 Liters, 20 Liters, 25 Liters, 50 Liters, 75 Liters, 100 Liters, 200 Liters, 500 Liters, 1,000 Liters, 2,000 Liters, 5,000 Liters, 10,000 Liters, or 50,000 Liters.

[0500] In some embodiments, the fermentation medium can be a nutrient solution used for growing and or maintaining cells. Without limitation, this solution ordinarily provides at least one component from one or more of the following categories: (1) an energy source, usually in the form of a carbon source, e.g., glucose; (2) all essential amino acids, and usually the basic set of twenty amino acids; (3) vitamins and/or other organic compounds required at low concentrations; (4) free fatty acids or lipids, for example linoleic acid; and (5) trace elements, where trace elements are defined as inorganic compounds or naturally occurring elements that are typically required at very low concentrations, usually in the micromolar range.

[0501] In some embodiments, the fermentation medium can be the same as the cell culture medium or any other media described herein. In some embodiments, the fermentation medium can be different from the cell culture medium. In some embodiments, the fermentation medium can be modified in order to accommodate the large-scale production of proteins.

[0502] In some embodiments, the fermentation medium can be supplemented electively with one or more components from any of the following categories: (1) hormones and other growth factors such as, serum, insulin, transferrin, and the like; (2) salts, for example, magnesium, calcium, and phosphate; (3) buffers, such as HEPES; (4) nucleosides and bases such as, adenosine, thymidine, etc.; (5) protein and tissue hydrolysates, for example peptone or peptone mixtures which can be obtained from purified gelatin, plant material, or animal byproducts; (6) antibiotics, such as gentamycin; and (7) cell protective agents, for example pluronic polyol.

[0503] In some embodiments, the pH of the fermentation medium can be maintained using pH buffers and methods known to those of skill in the art. Control of pH during fermentation can also can be achieved using aqueous ammonia. In some embodiments, the pH of the fermentation medium will be selected based on the preferred pH of the organism used. Thus, in some embodiments, and depending on the host cell and temperature, the pH can range from about to 1 to about 10.

[0504] In some embodiments, the pH of the fermentation medium can range from a pH of 2 to 8.5. In certain embodiments, the pH is about 4.0, 4.1, 4.2, 4.3, 4.4, 4.5, 4.6, 4.7, 4.8, 4.9, 5.0, 5.1, 5.2, 5.3, 5.4, 5.5, 5.6, 5.7, 5.8, 5.9, 6.0, 6.1, 6.2, 6.3, 6.4, 6.5, 6.6, 6.7, 6.8, 6.9, 7.0, 7.1, 7.2, 7.3, 7.4, 7.5, 7.6, 7.7, 7.8, 7.9, 8.0, 8.1, 8.2, 8.3, 8.4, 8.5, 8.6, 8.7, or 8.8.

[0505] In other embodiments, the pH is about 5.7 to 5.9, 5.8 to 6.0, 5.9 to 6.1, 6.0 to 6.2, 6.1 to 6.3, 6.2 to 6.5, 6.4 to 6.7, 6.5 to 6.8, 6.6 to 6.9, 6.7 to 7.0, 6.8 to 7.1, 6.9 to 7.2, 7.0 to 7.3, 7.1 to 7.4, 7.2 to 7.5, 7.3 to 7.6, 7.4 to 7.7, 7.5 to 7.8, 7.6 to 7.9, 7.7 to 8.0, 7.8 to 8.1, 7.9 to 8.2, 8.0 to 8.3, 8.1 to 8.4, 8.2 to 8.5, 8.3 to 8.6, 8.4 to 8.7, or 8.5 to 8.8

[0506] In some embodiments, e.g., where Escherichia coli (E. coli) is used, the optimal pH range is between 6.5 and 7.5, depending on the temperature.

[0507] In other embodiments, e.g., where a yeast strain is used, the pH can range from about 4.0 to 8.0.

[0508] In some embodiments, neutral pH, i.e., a pH of about 7.0 can be used.

[0509] Those having ordinary skill in the art will recognize that during fermentation, the pH levels may drift as result of conversion and production of substrates and metabolic compounds.

[0510] In some embodiments, the fermentation medium can be supplemented with a buffer or other chemical in order to avoid changes to the pH. For example, in some embodiments, the addition of Ca(OH)₂, CaCO₃, NaOH, or NH₄OH can be added to the fermentation medium to neutralize the production of acidic compounds that occur, e.g., in some yeast species during industrial processes.

[0511] Temperature is another important consideration in the fermentation process; and, like pH considerations, temperature will depend on the type of host cell selected.

[0512] In some embodiments, the fermentation temperature is maintained at about 4° C. to about 42° C. In certain embodiments, the fermentation temperature is about 4° C., about 5° C., about 6° C., about 7° C., about 8° C., about 9° C., about 10° C., about 11° C., about 12° C., about 13° C., about 14° C., about 15° C., about 16° C., about 17° C., about 18° C., about 19° C., about 20° C., about 21° C., about 22° C., about 23° C., about 24° C., about 25° C., about 26° C., about 27° C., about 28° C., about 29° C., about 30° C., about 31° C., about 32° C., about 33° C., about 34° C., about 35° C., about 36° C., about 37° C., about 38° C., about 39° C., about 40° C., about 41° C., or about 42° C.

[0513] In other embodiments, the fermentation temperature is maintained at about 25° C. to about 27° C., about 25° C. to about 28° C., about 25° C. to about 29° C., about 25° C. to about 30° C., about 25° C. to about 31° C., about 25° C. to about 32° C., about 25° C. to about 33° C., about 26° C. to about 28° C., about 26° C. to about 29° C., about 26° C. to about 30° C., about 26° C. to about 31° C., about 26° C. to about 32° C., about 27° C. to about 29° C., about 27° C. to about 30° C., about 27° C. to about 31° C., about 27° C. to about 32° C., about 26° C. to about 33° C., about 28° C. to about 30° C., about 28° C. to about 31° C., about 28° C. to about 32° C., about 29° C. to about 31° C., about 29° C. to about 32° C., about 29° C. to about 33° C., about 30° C. to about 32° C., about 30° C. to about 33° C., about 31° C. to about 33° C., about 31° C. to about 32° C., about 30° C. to about 33° C., or about 32° C. to about 33° C.

[0514] In other embodiments, the temperature is changed during fermentation, e.g., depending on the stage of fermentation.

[0515] Fermentation can be achieved with a variety of microorganisms known to those having ordinary skill in the art. Suitable microorganisms for up-scaled production of a CRIP, a CRIP-insecticidal protein, or a peptide-IA include any microorganism listed herein. In some embodiments, non-limiting examples of microorganisms include strains of the genus Saccharomyces spp. (including, but not limited to, S. cerevisiae (baker's yeast), S. distaticus, S. uvarum), the genus Kluyveromyces, (including, but not limited to, K. marxianus, K fragilis), the genus Candida (including, but not limited to, C. pseudotropicalis, and C. brassicae), Pichia stipitis (a relative of Candida shehatae), the genus Clavispora (including, but not limited to, C. lusitaniae and C. opuntiae), the genus Pachysolen (including, but not limited to, P. tannophilus), the genus Bretannomyces (including, but not limited to, e.g., B. clausenii. Other suitable microorganisms include, for example, Zymomonas mobilis, Clostridium spp. (including, but not limited to, C. thermocellum; C. saccharobutylacetonicum, C. saccharobutylicum, C. puniceum, C. beijernckii, and C. acetobutylicum), Moniliella pollinis, Moniliella megachiliensis, Lactobacillus spp. Yarrowia lipolytica, Aureobasidium sp., Trichosporonoides sp., Trigonopsis variabilis, Trichosporon sp., Moniliellaacetoabutans sp., Typhula variabilis, Candida magnolias, Ustilaginomycetes sp., Pseudozyma tsukubaensis, yeast species of genera Zygosaccharomyces, Debaryomyces, Hansenula and Pichia, and fungi of the dematioid genus Torula. See, e.g., Philippidis, G. P., 1996, Cellulose bioconversion technology, in Handbook on Bioethanol: Production and Utilization, Wyman, C. E., ed., Taylor & Francis, Washington, D.C., 179-212.

[0516] Fermentation medium may be selected depending on the host cell and/or needs of the end-user. Any necessary supplements besides, e.g., carbon, may also be included at appropriate concentrations introduced alone or as a mixture with another supplement or medium such as a complex nitrogen source.

[0517] Yeast Fermentation

[0518] Fermentation methods using yeast are well known to those having ordinary skill in the art. In some embodiments, batch fermentation can be used according to the methods provided herein; in other embodiments, continuous fermentation procedures can be used.

[0519] In some embodiments, the batch method of fermentation can be used to produce CRIPs, CRIP-insecticidal proteins, or peptide-IAs of the present invention. Briefly, the batch method of fermentation refers to a type of fermentation that is performed with a closed system, wherein the composition of the medium is determined at the beginning of the fermentation and is not subject to artificial alterations during the fermentation (i.e., the medium is inoculated with one or more yeast cells at the start of fermentation, and fermentation is allowed to proceed, uninterrupted by the user). Typically, in batch fermentation systems, the metabolite and biomass compositions of the system change constantly up to the time the fermentation is stopped. Within batch cultures, yeast cells pass through a static lag phase to a high growth log phase, and, finally, to a stationary phase, in which the growth rate is diminished or stopped. If untreated, yeast cells in the stationary phase will eventually die. In a batch method, yeast cells in log phase generally are responsible for the bulk of synthesis of end product.

[0520] In some embodiments, fed-batch fermentation can be used to produce CRIPs, CRIP-insecticidal proteins, or peptide-IAs of the present invention. Briefly, fed-batch fermentation is similar to typical batch method (described above), however, the substrate in the fed-batch method is added in increments as the fermentation progresses. Fed-batch fermentation is useful when catabolite repression may inhibit yeast cell metabolism, and when it is desirable to have limited amounts of substrate in the medium. Generally, the measurement of the substrate concentration in a fed-batch system is estimated on the basis of the changes of measurable factors reflecting metabolism, such as pH, dissolved oxygen, the partial pressure of waste gases (e.g., CO₂), and the like.

[0521] In some embodiments, the fed-batch fermentation procedure can be used to produce CRIPs, CRIP-insecticidal proteins, or peptide-IAs as follows: culturing a production organism (e.g., a modified yeast cell) in a 10 L bioreactor sparged with an N₂/CO₂ mixture, using 5 L broth containing 5 g/L potassium phosphate, 2.5 g/L ammonium chloride, 0.5 g/L magnesium sulfate, and 30 g/L corn steep liquor, and an initial first and second carbon source concentration of 20 g/L. As the modified yeast cells grow and utilize the carbon sources, additional 70% carbon source mixture is then fed into the bioreactor at a rate approximately balancing carbon source consumption. The temperature of the bioreactor is generally maintained at 30° C. Growth continues for approximately 24 hours or more, and the heterologous peptides reach a desired concentration, e.g., with the cell density being between about 5 and 10 g/L. Upon completion of the cultivation period, the fermenter contents can be passed through a cell separation unit such as a centrifuge to remove cells and cell debris, and the fermentation broth can be transferred to a product separations unit. Isolation of the heterologous peptides can take place by standard separations procedures well known in the art.

[0522] In some embodiments, continuous fermentation can be used to produce CRIPs, CRIP-insecticidal proteins, or peptide-IAs of the present invention. Briefly, continuous fermentation refers to fermentation with an open system, wherein a fermentation medium is added continuously to a bioreactor, and an approximately equal amount of conditioned medium is removed simultaneously for processing. Continuous fermentation generally maintains the cultures at a high density, in which yeast cells are primarily in log phase growth. Typically, continuous fermentation methods are performed to maintain steady state growth conditions, and yeast cell loss, due to medium withdrawal, should be balanced against the cell growth rate in the fermentation.

[0523] In some embodiments, the continuous fermentation method can be used to produce CRIPs, CRIP-insecticidal proteins, or peptide-IAs as follows: a modified yeast strain can be cultured using a bioreactor apparatus and a medium composition, albeit where the initial first and second carbon source is about, e.g., 30-50 g/L. When the carbon source is exhausted, feed medium of the same composition is supplied continuously at a rate of between about 0.5 L/hr and 1 L/hr, and liquid is withdrawn at the same rate. The heterologous peptide concentration in the bioreactor generally remains constant along with the cell density. Temperature is generally maintained at 30° C., and the pH is generally maintained at about 4.5 using concentrated NaOH and HCl, as required.

[0524] In some embodiments, when producing CRIPs, CRIP-insecticidal proteins, or peptide-IAs, the bioreactor can be operated continuously, for example, for about one month, with samples taken every day or as needed to assure consistency of the target chemical compound concentration. In continuous mode, fermenter contents are constantly removed as new feed medium is supplied. The exit stream, containing cells, medium, and heterologous peptides, can then be subjected to a continuous product separations procedure, with or without removing cells and cell debris, and can be performed by continuous separations methods well known in the art to separate organic products from peptides of interest.

[0525] In some embodiments, a yeast cell operable to express a CRIP, a CRIP-insecticidal protein, or a peptide-IA can be grown, e.g., using a fed batch process in aerobic bioreactor. Briefly, reactors are filled to about 20% to about 70% capacity with medium comprising a carbon source and other reagents. Temperature and pH is maintained using one or more chemicals as described herein. Oxygen level is maintained by sparging air intermittently in concert with agitation.

[0526] For example, in some embodiments, the present invention provides a method of using a fed batch process in aerobic bioreactor, wherein the reactor is filled to about 20%; 21%; 22%; 23%; 24%; 25%; 26%; 27%; 28%; 29%; 30%; 31%; 32%; 33%; 34%; 35%; 36%; 37%; 38%; 39%; 40%; 41%; 42%; 43%; 44%; 45%; 46%; 47%; 48%; 49%; 50%; 51%; 52%; 53%; 54%; 55%; 56%; 57%; 58%; 59%; 60%; 61%; 62%; 63%; 64%; 65%; 66%; 67%; 68%; 69%; or 70% capacity.

[0527] In some embodiments, the present invention provides a fed batch fermentation method using an aerobic bioreactor to produce CRIPs, CRIP-insecticidal proteins, or peptide-IAs, wherein the medium is a rich culture medium. For example, in some embodiments, the carbon source can be glucose, sorbitol, or lactose.

[0528] In some embodiments, the amount of glucose can be about 2 g/L; 3 g/L; 4 g/L; 5 g/L; 6 g/L; 7 g/L; 8 g/L; 9 g/L; 10 g/L; 11 g/L; 12 g/L; 13 g/L; 14 g/L; 15 g/L; 16 g/L; 17 g/L; 18 g/L; 19 g/L; 20 g/L; 21 g/L; 22 g/L; 23 g/L; 24 g/L; 25 g/L; 26 g/L; 27 g/L; 28 g/L; 29 g/L; or 30 g/L of the medium.

[0529] In some embodiments, the amount of sorbitol can be about 2 g/L; 3 g/L; 4 g/L; 5 g/L; 6 g/L; 7 g/L; 8 g/L; 9 g/L; 10 g/L; 11 g/L; 12 g/L; 13 g/L; 14 g/L; 15 g/L; 16 g/L; 17 g/L; 18 g/L; 19 g/L; 20 g/L; 21 g/L; 22 g/L; 23 g/L; 24 g/L; 25 g/L; 26 g/L; 27 g/L; 28 g/L; 29 g/L; or 30 g/L of the medium.

[0530] In some embodiments, the amount of lactose can be about 2 g/L; 3 g/L; 4 g/L; 5 g/L; 6 g/L; 7 g/L; 8 g/L; 9 g/L; 10 g/L; 11 g/L; 12 g/L; 13 g/L; 14 g/L; 15 g/L; 16 g/L; 17 g/L; 18 g/L; 19 g/L; 20 g/L; 21 g/L; 22 g/L; 23 g/L; 24 g/L; 25 g/L; 26 g/L; 27 g/L; 28 g/L; 29 g/L; or 30 g/L of the medium.

[0531] In some embodiments, the present invention provides a fed batch fermentation method using an aerobic bioreactor, wherein the medium is supplemented with one or more of phosphoric acid, calcium sulfate, potassium sulfate, magnesium sulfate heptahydrate, potassium hydroxide, and/or corn steep liquor.

[0532] In some embodiments, the medium can be supplemented with phosphoric acid in an amount of about 2 g/L; 3 g/L; 4 g/L; 5 g/L; 6 g/L; 7 g/L; 8 g/L; 9 g/L; 10 g/L; 11 g/L; 12 g/L; 13 g/L; 14 g/L; 15 g/L; 16 g/L; 17 g/L; 18 g/L; 19 g/L; 20 g/L; 21 g/L; 22 g/L; 23 g/L; 24 g/L; 25 g/L; 26 g/L; 27 g/L; 28 g/L; 29 g/L; or 30 g/L to the medium.

[0533] In some embodiments, the medium can be supplemented with calcium sulfate in an amount of about 0.05 g/L; 0.15 g/L; 0.25 g/L; 0.35 g/L; 0.45 g/L; 0.55 g/L; 0.65 g/L; 0.75 g/L; 0.85 g/L; 0.95 g/L; 1.05 g/L; 1.15 g/L; 1.25 g/L; 1.35 g/L; 1.45 g/L; 1.55 g/L; 1.65 g/L; 1.75 g/L; 1.85 g/L; 1.95 g/L; 2.05 g/L; 2.15 g/L; 2.25 g/L; 2.35 g/L; 2.45 g/L; 2.55 g/L; 2.65 g/L; 2.75 g/L; 2.85 g/L; or 2.95 g/L to the medium.

[0534] In some embodiments, the medium can be supplemented with potassium sulfate in an amount of about 2 g/L; 2.5 g/L; 3 g/L; 3.5 g/L; 4 g/L; 4.5 g/L; 5 g/L; 5.5 g/L; 6 g/L; 6.5 g/L; 7 g/L; 7.5 g/L; 8 g/L; 8.5 g/L; 9 g/L; 9.5 g/L; 10 g/L; 10.5 g/L; 11 g/L; 11.5 g/L; 12 g/L; 12.5 g/L; 13 g/L; 13.5 g/L; 14 g/L; 14.5 g/L; 15 g/L; 15.5 g/L; 16 g/L; 16.5 g/L; 17 g/L; 17.5 g/L; 18 g/L; 18.5 g/L; 19 g/L; 19.5 g/L; or 20 g/L to the medium.

[0535] In some embodiments, the medium can be supplemented with magnesium sulfate heptahydrate in an amount of about 0.25 g/L; 0.5 g/L; 0.75 g/L; 1 g/L; 1.25 g/L; 1.5 g/L; 1.75 g/L; 2 g/L; 2.25 g/L; 2.5 g/L; 2.75 g/L; 3 g/L; 3.25 g/L; 3.5 g/L; 3.75 g/L; 4 g/L; 4.25 g/L; 4.5 g/L; 4.75 g/L; 5 g/L; 5.25 g/L; 5.5 g/L; 5.75 g/L; 6 g/L; 6.25 g/L; 6.5 g/L; 6.75 g/L; 7 g/L; 7.25 g/L; 7.5 g/L; 7.75 g/L; 8 g/L; 8.25 g/L; 8.5 g/L; 8.75 g/L; 9 g/L; 9.25 g/L; 9.5 g/L; 9.75 g/L; 10 g/L; 10.25 g/L; 10.5 g/L; 10.75 g/L; 11 g/L; 11.25 g/L; 11.5 g/L; 11.75 g/L; 12 g/L; 12.25 g/L; 12.5 g/L; 12.75 g/L; 13 g/L; 13.25 g/L; 13.5 g/L; 13.75 g/L; 14 g/L; 14.25 g/L; 14.5 g/L; 14.75 g/L; or 15 g/L to the medium.

[0536] In some embodiments, the medium can be supplemented with potassium hydroxide in an amount of about 0.25 g/L; 0.5 g/L; 0.75 g/L; 1 g/L; 1.25 g/L; 1.5 g/L; 1.75 g/L; 2 g/L; 2.25 g/L; 2.5 g/L; 2.75 g/L; 3 g/L; 3.25 g/L; 3.5 g/L; 3.75 g/L; 4 g/L; 4.25 g/L; 4.5 g/L; 4.75 g/L; 5 g/L; 5.25 g/L; 5.5 g/L; 5.75 g/L; 6 g/L; 6.25 g/L; 6.5 g/L; 6.75 g/L; or 7 g/L to the medium.

[0537] In some embodiments, the medium can be supplemented with corn steep liquor in an amount of about 5 g/L; 6 g/L; 7 g/L; 8 g/L; 9 g/L; 10 g/L; 11 g/L; 12 g/L; 13 g/L; 14 g/L; 15 g/L; 16 g/L; 17 g/L; 18 g/L; 19 g/L; 20 g/L; 21 g/L; 22 g/L; 23 g/L; 24 g/L; 25 g/L; 26 g/L; 27 g/L; 28 g/L; 29 g/L; 30 g/L; 31 g/L; 32 g/L; 33 g/L; 34 g/L; 35 g/L; 36 g/L; 37 g/L; 38 g/L; 39 g/L; 40 g/L; 41 g/L; 42 g/L; 43 g/L; 44 g/L; 45 g/L; 46 g/L; 47 g/L; 48 g/L; 49 g/L; 50 g/L; 51 g/L; 52 g/L; 53 g/L; 54 g/L; 55 g/L; 56 g/L; 57 g/L; 58 g/L; 59 g/L; 60 g/L; 61 g/L; 62 g/L; 63 g/L; 64 g/L; 65 g/L; 66 g/L; 67 g/L; 68 g/L; 69 g/L; or 70 g/L to the medium.

[0538] In some embodiments, the temperature of the reactor can be maintained between about 15° C. and about 45° C. In some embodiments, the reactor can have a temperature of about 20° C., 21° C., 22° C., 23° C., 24° C., 25° C., 26° C., 27° C., 28° C., 29° C., 30° C., 31° C., 32° C., 33° C., 34° C., 35° C., 36° C., 37° C., 38° C., 39° C., or 40° C.

[0539] In some embodiments, the pH can have a level of about 3 to about 6. In some embodiments, the pH can be 3.0, 3.1, 3.2, 3.3, 3.4, 3.5, 3.6, 3.7, 3.8, 3.9, 4, 4.1, 4.2, 4.3, 4.4, 4.5, 4.6, 4.7, 4.8, 4.9, 5, 5.1, 5.2, 5.3, 5.4, 5.5, 5.6, 5.7, 5.8, 5.9, or 6.0.

[0540] In some embodiments, the pH can be maintained at a constant level via the addition of one or more chemicals. For example, in some embodiments, ammonium hydroxide can be added to maintain pH. In some embodiments, ammonium hydroxide can be added to a level of ammonium hydroxide in the medium that is about 5%, 6%, 7%, 8%, 9%, 10%, 11%, 12%, 13%, 14%, 15%, 16%, 17%, 18%, 19%, or 20%, of ammonium hydroxide

[0541] In some embodiments, oxygen levels can be maintained by sparging. For example, in some embodiments, dissolved oxygen can be maintained at a constant level by sparging air between 0.5-1.5 volume/volume/min and by increasing agitation to maintain a set point of 10-30%.

[0542] In some embodiments, inoculation of the reactor can be accomplished based on an overnight seed culture comprising from about 2.5 g/L to about 50 g/L of a carbon source, e.g., glucose, sorbitol, or lactose. In some embodiments, the overnight seed culture can comprise corn steep liquor, e.g., from about 2.5 g/L to about 50 g/L of corn steep liquor.

[0543] In some embodiments, the inoculation percentage can range from about 5-20% of initial fill volume. Following inoculation, the reactor can be fed with from about a 50% to about an 80% solution of the selected carbon source up until the reactor is filled and/or the desired supernatant peptide concentration is achieved. In some embodiments, the time required to fill the reactor can range from about 86 hours to about 160 hours. In some embodiments, the quantity required to reach the desired peptide concentration can range from about 0.8 g/L to about 1.2 g/L. Upon completion of the fermentation, the contents can be passed through a cell separation unit and optionally concentrated, depending on intended use of the material.

[0544] Additional recipes for yeast fermentation media are provided herein.

[0545] Recipes for yeast cell fermentation media and stocks are described as follows: (1) MSM media recipe: 2 g/L sodium citrate dihydrate; 1 g/L calcium sulfate dihydrate (0.79 g/L anhydrous calcium sulfate); 42.9 g/L potassium phosphate monobasic; 5.17 g/L ammonium sulfate; 14.33 g/L potassium sulfate; 11.7 g/L magnesium sulfate heptahydrate; 2 mL/L PTM1 trace salt solution; 0.4 ppm biotin (from 500×, 200 ppm stock); 1-2% pure glycerol or other carbon source. (2) PTM1 trace salts solution: Cupric sulfate-5H₂O 6.0 g; Sodium iodide 0.08 g; Manganese sulfate-H₂O 3.0 g; Sodium molybdate-2H₂O 0.2 g; Boric Acid 0.02 g; Cobalt chloride 0.5 g; Zinc chloride 20.0 g; Ferrous sulfate-7H₂O 65.0 g; Biotin 0.2 g; Sulfuric Acid 5.0 ml; add Water to a final volume of 1 liter. An illustrative composition for K. lactis defined medium (DMSor) is as follows: 11.83 g/L KH₂PO₄, 2.299 g/L K₂HPO₄, 20 g/L of a fermentable sugar, e.g., galactose, maltose, latotriose, sucrose, fructose or glucose and/or a sugar alcohol, for example, erythritol, hydrogenated starch hydrolysates, isomalt, lactitol, maltitol, mannitol, and xylitol, 1 g/L MgSO₄·7H₂O, 10 g/L (NH₄)₅O₄, 0.33 g/L CaCl₂·2H₂O, 1 g/L NaCl, 1 g/L KCl, 5 mg/L CuSO₄·5H₂O, 30 mg/L MnSO₄·H₂O, 10 mg/L, ZnCl₂, 1 mg/L KI, 2 mg/L CoCl₂·6H₂O, 8 mg/L Na₂MoO₄·2H₂O, 0.4 mg/L H₃BO₃·15 mg/L FeCl₃·6H₂O, 0.8 mg/L biotin, 20 mg/L Ca-pantothenate, 15 mg/L thiamine, 16 mg/L myo-inositol, 10 mg/L nicotinic acid, and 4 mg/L pyridoxine.

[0546] Peptide Degradation

[0547] Proteins, polypeptides, and peptides degrade in both biological samples and in solution (e.g., cell culture and/or during fermentation). Methods of detecting peptide degradation (e.g., degradation of a CRIP, a CRIP-insecticidal protein, or a peptide-IA) are well known in the art. Any of the well-known methods of detecting peptide degradation (e.g., during fermentation) may be employed here.

[0548] In some embodiments, peptide degradation can be detected using isotope labeling techniques; liquid chromatography/mass spectrometry (LC/MS); HPLC; radioactive amino acid incorporation and subsequent detection, e.g., via scintillation counting; the use of a reporter protein, e.g., a protein that can be detected (e.g., by fluorescence, spectroscopy, luminometry, etc.); fluorescent intensity of one or more bioluminescent proteins and/or fluorescent proteins and/or fusions thereof; pulse-chase analysis (e.g., pulse-labeling a cell with radioactive amino acids and following the decay of the labeled protein while chasing with unlabeled precursor, and arresting protein synthesis and measuring the decay of total protein levels with time); cycloheximide-chase assays;

[0549] In some embodiments, an assay can be used to detect peptide degradation, wherein a sample is contacted with a non-fluorescent compound that is operable to react with free primary amine in said sample produced via the degradation of a peptide, and which then produces a fluorescent signal that can be quantified and compared to a standard. Examples of non-fluorescent compounds that can be utilized as fluorescent tags for free amines according to the present disclosure are 3-(4-carboxybenzoyl) quinoline-2-carboxaldehyde (CBQCA), fluorescamine, and o-phthaldialdehyde.

[0550] In some embodiments, the method to determine the readout signal from the reporter protein depends from the nature of the reporter protein. For example, for fluorescent reporter proteins, the readout signal corresponds to the intensity of the fluorescent signal. The readout signal may be measured using spectroscopy-, fluorometry-, photometry-, and/or luminometry-based methods and detection systems, for example. Such methods and detection systems are well known in the art.

[0551] In some embodiments, standard immunological procedures known to those having ordinary skill in the art can be used to detect peptide degradation. For example, in some embodiments, peptide degradation can be detected in a sample using immunoassays that employ a detectable antibody. Such immunoassays include, for example, agglutination assays, ELISA, Pandex microfluorimetric assay, flow cytometry, serum diagnostic assays, and immunohistochemical staining procedures, all of which are well-known in the art. In some embodiments, the levels (e.g., of fluorescence) in one sample can be compared to a standard. An antibody can be made detectable by various means well known in the art. For example, a detectable marker can be directly or indirectly attached to the antibody. Useful markers include, for example, radionucleotides, enzymes, fluorogens, chromogens and chemiluminescent labels.

[0552] Exemplary methods of detecting peptide degradation is provided in U.S. Pat. Nos. 5,766,927; 7,504,253; 9,201,073; 9,429,566; United States Patent Application 20120028286; Eldeeb et al., A molecular toolbox for studying protein degradation in mammalian cells. J Neurochem. 2019 November; 151(4):520-533; and Buchanan et al., Cycloheximide Chase Analysis of Protein Degradation in Saccharomyces cerevisiae. J Vis Exp. 2016; (110): 53975, the disclosures of which are incorporated herein by reference in their entireties.
[0553] A
[0554] A
[0555] A
[0556] a

[0557] CRIP Incorporation into Plants or Parts Thereof

[0558] The CRIPs, CRIP-insecticidal proteins, and peptide-IAs described herein, and/or an insecticidal protein comprising at least one CRIP or peptide-IA as described herein, can be incorporated into plants, plant tissues, plant cells, plant seeds, and/or plant parts thereof, for either the stable, or transient expression of a CRIP, a CRIP-insecticidal protein, or a peptide-IA, and/or a polynucleotide sequence encoding the same.

[0559] In some embodiments, the CRIP or peptide-IA can be incorporated into a plant using recombinant techniques known in the art. In some embodiments, the CRIP or peptide-IA or insecticidal protein comprising at least one CRIP or peptide-IA may be in the form of an insecticidal protein which may comprise one or more CRIP or peptide-IA monomers. In other embodiments, the insecticidal protein comprising at least one CRIP or peptide-IA may also comprise one or more non-CRIP or non-IA polypeptides or proteins, e.g. an endoplasmic reticulum signal peptide operably linked to one or more CRIPs or peptide-IAs.

[0560] As used in this section, with respect to transgenic plants, plant tissues, plant cells, and plant seeds, the term “CRIP” or “peptide-IA” also encompasses an insecticidal protein comprising one or more CRIPs or peptide-IAs in addition to one or more non-CRIP or non-IA peptides, polypeptides or proteins, and a “CRIP polynucleotide” or “IA polynucleotide” is similarly also used to encompass a polynucleotide or group of polynucleotides operable to express and/or encode an insecticidal protein comprising one or more CRIPs or peptide-IAs in addition to one or more non-CRIP or non-IA polypeptides or proteins.

[0561] The goal of incorporating a CRIP, a CRIP-insecticidal protein, or a peptide-IA, into plants (i.e., to make transgenic plants that express CRIPs or peptide-IAs) is to deliver insecticidal proteins to the pest via the insect's consumption of the transgenic CRIP, CRIP-insecticidal protein, or peptide-IA expressed in a plant tissue consumed by the insect. Upon the consumption of the CRIP, CRIP-insecticidal protein, or peptide-IA by the insect from its food (e.g., an insect feeding upon a transgenic plant), the consumed CRIP, CRIP-insecticidal protein, or peptide-IA may have the ability to inhibit the growth, impair the movement, or even kill an insect. Accordingly, transgenic plants expressing a CRIP, a CRIP-insecticidal protein, or a peptide-IA polynucleotide and/or a CRIP, a CRIP-insecticidal protein, or a peptide-IA polypeptide may express said CRIP, CRIP-insecticidal protein, or peptide-IA polynucleotide/polypeptide in a variety of plant tissues, including but not limited to, the epidermis (e.g., mesophyll); periderm; phloem; xylem; parenchyma; collenchyma; sclerenchyma; and primary and secondary meristematic tissues. For example, in some embodiments, a polynucleotide sequence encoding a CRIP, a CRIP-insecticidal protein, or a peptide-IA can be operably linked to a regulatory region containing a phosphoenolpyruvate carboxylase promoter, resulting in the expression of a CRIP, a CRIP-insecticidal protein, or a peptide-IA in a plant's mesophyll tissue.

[0562] Transgenic plants expressing a CRIP, a CRIP-insecticidal protein, or a peptide-IA and/or a polynucleotide operable to express CRIP/peptide-IA can be generated by any one of the various methods and protocols well known to those having ordinary skill in the art; such methods of the invention do not require that a particular method for introducing a nucleotide construct to a plant be used, only that the nucleotide construct gains access to the interior of at least one cell of the plant. Methods for introducing nucleotide constructs into plants are known in the art including, but not limited to, stable transformation methods, transient transformation methods, and virus-mediated methods. “Transgenic plants” or “transformed plants” or “stably transformed” plants or cells or tissues refers to plants that have incorporated or integrated exogenous nucleic acid sequences or DNA fragments into the plant cell. These nucleic acid sequences include those that are exogenous, or not present in the untransformed plant cell, as well as those that may be endogenous, or present in the untransformed plant cell. “Heterologous” generally refers to the nucleic acid sequences that are not endogenous to the cell or part of the native genome in which they are present, and have been added to the cell by infection, transfection, microinjection, electroporation, microprojection, or the like.

[0563] Transformation of plant cells can be accomplished by one of several techniques known in the art. Typically, a construct that expresses an exogenous or heterologous peptide or polypeptide of interest (e.g., a CRIP, a CRIP-insecticidal protein, or a peptide-IA), would contain a promoter to drive transcription of the gene, as well as a 3′ untranslated region to allow transcription termination and polyadenylation. The design and organization of such constructs is well known in the art. In some embodiments, a gene can be engineered such that the resulting peptide is secreted, or otherwise targeted within the plant cell to a specific region and/or organelle. For example, the gene can be engineered to contain a signal peptide to facilitate transfer of the peptide to the endoplasmic reticulum. It may also be preferable to engineer the plant expression cassette to contain an intron, such that mRNA processing of the intron is required for expression.

[0564] Typically, a plant expression cassette can be inserted into a plant transformation vector. This plant transformation vector may be comprised of one or more DNA vectors needed for achieving plant transformation. For example, it is a common practice in the art to utilize plant transformation vectors that are comprised of more than one contiguous DNA segment. These vectors are often referred to in the art as “binary vectors.” Binary vectors as well as vectors with helper plasmids are most often used for Agrobacterium-mediated transformation, where the size and complexity of DNA segments needed to achieve efficient transformation is quite large, and it is advantageous to separate functions onto separate DNA molecules. Binary vectors typically contain a plasmid vector that contains the cis-acting sequences required for T-DNA transfer (such as left border and right border), a selectable marker that is engineered to be capable of expression in a plant cell, and a “gene of interest” (a gene engineered to be capable of expression in a plant cell for which generation of transgenic plants is desired). Also present on this plasmid vector are sequences required for bacterial replication. The cis-acting sequences are arranged in a fashion to allow efficient transfer into plant cells and expression therein. For example, the selectable marker gene and the CRIP/peptide-IA are located between the left and right borders. Often a second plasmid vector contains the trans-acting factors that mediate T-DNA transfer from Agrobacterium to plant cells. This plasmid often contains the virulence functions (Vir genes) that allow infection of plant cells by Agrobacterium, and transfer of DNA by cleavage at border sequences and vir-mediated DNA transfer, as is understood in the art (Hellens and Mullineaux (2000) Trends in Plant Science 5:446-451). Several types of Agrobacterium strains (e.g. LBA4404, GV3101, EHA101, EHA105, etc.) can be used for plant transformation. The second plasmid vector is not necessary for transforming the plants by other methods such as microprojection, microinjection, electroporation, polyethylene glycol, etc.

[0565] In general, plant transformation methods involve transferring heterologous DNA into target plant cells (e.g. immature or mature embryos, suspension cultures, undifferentiated callus, protoplasts, etc.), followed by applying a maximum threshold level of appropriate selection (depending on the selectable marker gene) to recover the transformed plant cells from a group of untransformed cell mass. Explants are typically transferred to a fresh supply of the same medium and cultured routinely. Subsequently, the transformed cells are differentiated into shoots after placing on regeneration medium supplemented with a maximum threshold level of selecting agent. The shoots are then transferred to a selective rooting medium for recovering rooted shoot or plantlet. The transgenic plantlet then grows into a mature plant and produces fertile seeds (e.g. Hiei et al. (1994) The Plant Journal 6:271-282; Ishida et al. (1996) Nature Biotechnology 14:745-750). Explants are typically transferred to a fresh supply of the same medium and cultured routinely. A general description of the techniques and methods for generating transgenic plants are found in Ayres and Park (1994) Critical Reviews in Plant Science 13:219-239 and Bommineni and Jauhar (1997) Maydica 42:107-120. Because the transformed material contains many cells, both transformed and non-transformed cells are present in any piece of subjected target callus or tissue or group of cells. The ability to kill non-transformed cells and allow transformed cells to proliferate results in transformed plant cultures. Often, the ability to remove non-transformed cells is a limitation to rapid recovery of transformed plant cells and successful generation of transgenic plants.

[0566] Transformation protocols as well as protocols for introducing nucleotide sequences into plants may vary depending on the type of plant or plant cell, i.e., monocot or dicot, targeted for transformation. Generation of transgenic plants may be performed by one of several methods, including, but not limited to, microinjection, electroporation, direct gene transfer, introduction of heterologous DNA by Agrobacterium into plant cells (Agrobacterium-mediated transformation), bombardment of plant cells with heterologous foreign DNA adhered to particles, ballistic particle acceleration, aerosol beam transformation, Lec1 transformation, and various other non-particle direct-mediated methods to transfer DNA. Exemplary transformation protocols are disclosed in U.S. Published Application No. 20010026941; U.S. Pat. No. 4,945,050; International Publication No. WO 91/00915; and

[0567] U.S. Published Application No. 2002015066, the disclosures of which are incorporated herein by reference in their entireties.

[0568] Chloroplasts can also be readily transformed, and methods concerning the transformation of chloroplasts are known in the art. See, for example, Svab et al. (1990) Proc. Natl. Acad. Sci. USA 87:8526-8530; Svab and Maliga (1993) Proc. Natl. Acad. Sci. USA 90:913-917; Svab and Maliga (1993) EMBO J. 12:601-606, the disclosure of which is incorporated herein by reference in its entirety. The method of chloroplast transformation relies on particle gun delivery of DNA containing a selectable marker and targeting of the DNA to the plastid genome through homologous recombination. Additionally, plastid transformation can be accomplished by transactivation of a silent plastid-borne transgene by tissue-preferred expression of a nuclear-encoded and plastid-directed RNA polymerase. Such a system has been reported in McBride et al. (1994) Proc. Natl. Acad. Sci. USA 91:7301-7305.

[0569] Following integration of heterologous foreign DNA into plant cells, one having ordinary skill may then apply a maximum threshold level of appropriate selection chemical/reagent (e.g., an antibiotic) in the medium to kill the untransformed cells, and separate and grow the putatively transformed cells that survive from this selection treatment by transferring said surviving cells regularly to a fresh medium. By continuous passage and challenge with appropriate selection, an artisan identifies and proliferates the cells that are transformed with the plasmid vector. Molecular and biochemical methods can then be used to confirm the presence of the integrated heterologous gene of interest into the genome of the transgenic plant.

[0570] The cells that have been transformed may be grown into plants in accordance with conventional methods known to those having ordinary skill in the art. See, for example, McCormick et al. (1986) Plant Cell Reports 5:81-84, the disclosure of which is incorporated herein by reference in its entirety. These plants may then be grown, and either pollinated with the same transformed strain or different strains, and the resulting hybrid having constitutive expression of the desired phenotypic characteristic identified. Two or more generations may be grown to ensure that expression of the desired phenotypic characteristic is stably maintained and inherited and then seeds harvested to ensure expression of the desired phenotypic characteristic has been achieved. In this manner, the present disclosure provides transformed seed (also referred to as “transgenic seed”) having a nucleotide construct of the invention, for example, an expression cassette of the invention, stably incorporated into their genome.

[0571] In various embodiments, the present disclosure provides an insecticidal protein comprising at least one CRIP/peptide-IA, that act as substrates for insect proteinases, proteases and peptidases (collectively referred to herein as “proteases”) as described above.

[0572] In some embodiments, transgenic plants or parts thereof, that may be receptive to the expression of CRIPs or peptide-IAs and/or compositions comprising a CRIP, a CRIP-insecticidal protein, or a peptide-IA, as described herein, can include: alfalfa, banana, barley, bean, broccoli, cabbage, canola, carrot, cassava, castor, cauliflower, celery, chickpea, Chinese cabbage, citrus, coconut, coffee, corn, clover, cotton, a cucurbit, cucumber, Douglas fir, eggplant, eucalyptus, flax, garlic, grape, hops, leek, lettuce, Loblolly pine, millets, melons, nut, oat, olive, onion, ornamental, palm, pasture grass, pea, peanut, pepper, pigeonpea, pine, potato, poplar, pumpkin, Radiata pine, radish, rapeseed, rice, rootstocks, rye, safflower, shrub, sorghum, Southern pine, soybean, spinach, squash, strawberry, sugar beet, sugarcane, sunflower, sweet corn, sweet gum, sweet potato, switchgrass, tea, tobacco, tomato, triticale, turf grass, watermelon, and a wheat plant. In some embodiments the transgenic plant may be grown from cells that were initially transformed with the DNA constructs described herein. In other embodiments, the transgenic plant may express the encoded CRIP/peptide-IA compositions in a specific tissue, or plant part, for example, a leaf, a stem a flower, a sepal, a fruit, a root, or a seed or combinations thereof.

[0573] Any of the foregoing plant incorporation methods/techniques can be used to produce a CRIP and/or peptide-IA (e.g., an Insecticidal Agent that lends itself to such methods, e.g., a polymer of amino acids, a peptide or a protein). For example, any of the foregoing methods can be used to produce, generate, make, express, transcribe, translate, synthesize or otherwise create, any of the CRIPs or peptide-IAs described herein, including, without limitation, ACTX peptides (e.g., U-ACTX-Hv1a, U+2-ACTX-Hv1a, rU-ACTX-Hv1a, rU-ACTX-Hv1b, rκ-ACTX-Hv1c, ω-ACTX-Hv1a, and/or ω-ACTX-Hv1a+2); F-CNTX-Pn1a; U1-agatoxin-Ta1b; TVPs; Av2; Av3; AVPs; and/or Bt toxins (e.g., Cry toxins, Cyt toxins, or Vips).

[0574] Proteins with Cleavable Linkers and Non-Cleavable Linkers

[0575] In some embodiments, the insecticidal protein comprising at least one CRIP (or peptide-IA) can be operably linked to a cleavable peptide. In other embodiments, the insecticidal protein comprising at least one CRIP (or peptide-IA) can be operably linked to a non-cleavable peptide.

[0576] In some embodiments, the insecticidal protein comprising at least one CRIP/peptide-IA can have two or more cleavable peptides, wherein the insecticidal protein comprises an insect cleavable linker (L), the insect cleavable linker being fused in frame with a construct comprising (CRIP-L)ₙ, wherein “n” is an integer ranging from 1 to 200, or from 1 to 100, or from 1 to 10. In another embodiment, the insecticidal protein comprising at least one CRIP, and described herein, comprises an endoplasmic reticulum signal peptide (ERSP) operably linked with a CRIP, which is operably linked with an insect cleavable linker (L) and/or a repeat construct (L-CRIP)ₙ or (CRIP-L)ₙ, wherein n is an integer ranging from 1 to 200, or from 1 to 100, or from 1 to 10.

[0577] In various embodiments, an exemplary insecticidal protein can include a protein construct comprising: (ERSP)-(CRIP-L)ₙ; (ERSP)-(L)-(CRIP-L)ₙ; (ERSP)-(L-CRIP)ₙ; (ERSP)-(L-CRIP)ₙ-(L); wherein n is an integer ranging from 1 to 200 or from 1 to 100, or from 1 to 10. In various related embodiments described above, a CRIP is the aforementioned U1-agatoxin-Ta1b Variant Polypeptides, L is a non-cleavable or cleavable peptide, and n is an integer ranging from 1 to 200, preferably an integer ranging from 1 to 100, and more preferably an integer ranging from 1 to 10. In some embodiments, the insecticidal protein may contain CRIP peptides that are the same or different, and insect cleavable peptides that are the same or different. In some embodiments, the C-terminal CRIP is operably linked at its C-terminus with a cleavable peptide that is operable to be cleaved in an insect gut environment. In some embodiments, the N-terminal CRIP is operably linked at its N-terminus with a cleavable peptide that is operable to be cleaved in an insect gut environment.

[0578] Some of the available proteases and peptidases found in the insect gut environment are dependent on the life-stage of the insect, as these enzymes are often spatially and temporally expressed. The digestive system of the insect is composed of the alimentary canal and associated glands. Food enters the mouth and is mixed with secretions that may or may not contain digestive proteases and peptidases. The foregut and the hind gut are ectodermal in origin. The foregut serves generally as a storage depot for raw food. From the foregut, discrete boluses of food pass into the midgut (mesenteron or ventriculus). The midgut is the site of digestion and absorption of food nutrients. Generally, the presence of certain proteases and peptidases in the midgut follow the pH of the gut. Certain proteases and peptidases in the human gastrointestinal system may include: pepsin, trypsin, chymotrypsin, elastase, carboxypeptidase, aminopeptidase, and dipeptidase.

[0579] The insect gut environment includes the regions of the digestive system in the herbivore species where peptides and proteins are degraded during digestion. Some of the available proteases and peptidases found in insect gut environments may include: (1) serine proteases; (2) cysteine proteases; (3) aspartic proteases, and (4) metalloproteases.

[0580] The two predominant protease classes in the digestive systems of phytophagous insects are the serine and cysteine proteases. Murdock et al. (1987) carried out an elaborate study of the midgut enzymes of various pests belonging to Coleoptera, while Srinivasan et al. (2008) have reported on the midgut enzymes of various pests belonging to Lepidoptera. Serine proteases are known to dominate the larval gut environment and contribute to about 95% of the total digestive activity in Lepidoptera, whereas the Coleopteran species have a wider range of dominant gut proteases, including cysteine proteases.

[0581] The papain family contains peptidases with a wide variety of activities, including endopeptidases with broad specificity (such as papain), endopeptidases with very narrow specificity (such as glycyl endopeptidases), aminopeptidases, dipeptidyl-peptidase, and peptidases with both endopeptidase and exopeptidase activities (such as cathepsins B and H). Other exemplary proteinases found in the midgut of various insects include trypsin-like enzymes, e.g. trypsin and chymotrypsin, pepsin, carboxypeptidase-B and aminotripeptidases.

[0582] Serine proteases are widely distributed in nearly all animals and microorganisms (Joanitti et al., 2006). In higher organisms, nearly 2% of genes code for these enzymes (Barrette-Ng et al., 2003). Being essentially indispensable to the maintenance and survival of their host organism, serine proteases play key roles in many biological processes. Serine proteases are classically categorized by their substrate specificity, notably by whether the residue at P1: trypsin-like (Lys/Arg preferred at P1), chymotrypsin-like (large hydrophobic residues such as Phe/Tyr/Leu at P1), or elastase-like (small hydrophobic residues such as Ala/Val at P1) (revised by Tyndall et. al., 2005). Serine proteases are a class of proteolytic enzymes whose central catalytic machinery is composed of three invariant residues, an aspartic acid, a histidine and a uniquely reactive serine, the latter giving rise to their name, the “catalytic triad”. The Asp-His-Ser triad can be found in at least four different structural contexts (Hedstrom, 2002). These four clans of serine proteases are typified by chymotrypsin, subtilisin, carboxypeptidase Y, and Clp protease. The three serine proteases of the chymotrypsin-like clan that have been studied in greatest detail are chymotrypsin, trypsin, and elastase. More recently, serine proteases with novel catalytic triads and dyads have been discovered for their roles in digestion, including Ser-His-Glu, Ser-Lys/His, His-Ser-His, and N-terminal Ser.

[0583] One class of well-studied digestive enzymes found in the gut environment of insects is the class of cysteine proteases. The term “cysteine protease” is intended to describe a protease that possesses a highly reactive thiol group of a cysteine residue at the catalytic site of the enzyme. There is evidence that many phytophagous insects and plant parasitic nematodes rely, at least in part, on midgut cysteine proteases for protein digestion. These include but are not limited to Hemiptera, especially squash bugs (Anasa tristis); green stink bug (Acrosternum hilare); Riptortus clavatus; and almost all Coleoptera examined to date, especially, Colorado potato beetle (Leptinotarsa deaemlineata); three-lined potato beetle (Lema trilineata); asparagus beetle (Crioceris asparagi); Mexican bean beetle (Epilachna varivestis); red flour beetle (Triolium castaneum); confused flour beetle (Tribolium confusum); the flea beetles (Chaetocnema spp., Haltica spp., and Epitrix spp.); corn rootworm (Diabrotica Spp.); cowpea weevil (Callosobruchus aculatue); boll weevil (Antonomus grandis); rice weevil (Sitophilus oryza); maize weevil (Sitophilus zeamais); granary weevil (Sitophilus granarius); Egyptian alfalfa weevil (Hypera postica); bean weevil (Acanthoseelides obtectus); lesser grain borer (Rhyzopertha dominica); yellow meal worm (Tenebrio molitor); Thysanoptera, especially, western flower thrips (Franklini ella occidentalis); Diptera, especially, leafminer spp. (Liriomyza trifolii); plant parasitic nematodes especially the potato cyst nematodes (Globodera spp.), the beet cyst nematode (Heterodera schachtii) and root knot nematodes (Meloidogyne spp.).

[0584] Another class of digestive enzymes is the aspartic proteases. The term “aspartic protease” is intended to describe a protease that possesses two highly reactive aspartic acid residues at the catalytic site of the enzyme and which is most often characterized by its specific inhibition with pepstatin, a low molecular weight inhibitor of nearly all known aspartic proteases. There is evidence that many phytophagous insects rely, in part, on midgut aspartic proteases for protein digestion most often in conjunction with cysteine proteases. These include but are not limited to Hemiptera especially (Rhodnius prolixus) and bedbug (Cimex spp.) and members of the families Phymatidae, Pentatomidae, Lygaeidae and Belostomatidae; Coleoptera, in the families of the Meloidae, Chrysomelidae, Coccinelidae and Bruchidae all belonging to the series Cucujiformia, especially, Colorado potato beetle (Leptinotarsa decemlineata) three-lined potato beetle (Lematri lineata); southern and western corn rootworm (Diabrotica undecimpunctata and D. virgifera), boll weevil (Anthonomus grandis), squash bug (Anasatristis); flea beetle (Phyllotreta crucifera), bruchid beetle (Callosobruchus maculatus), Mexican bean beetle (Epilachna varivestis), soybean leafminer (Odontota horni), margined blister beetle (Epicauta pestifera) and the red flour beetle (Triolium castaneum); Diptera, especially housefly (Musca domestica) (Terra and Ferreira (1994) Comn. Biochem. Physiol. 109B: 1-62; Wolfson and Murdock (1990) J. Chem. Ecol. 16: 1089-1102).

[0585] Polynucleotide Incorporation into Plants

[0586] A challenge regarding the expression of heterogeneous polypeptides in transgenic plants is maintaining the desired effect (e.g., insecticidal activity) of the introduced polypeptide upon expression in the host organism; one way to maintain such an effect is to increase the chance of proper protein folding through the use of an operably linked Endoplasmic Reticulum Signal Peptide (ERSP). Another method to maintain the effect of a transgenic protein is to incorporate a Translational Stabilizing Protein (STA).

[0587] Endoplasmic Reticulum Signal Peptide (ERSP)

[0588] The subcellular targeting of a recombinant protein to the ER can be achieved through the use of an ERSP operably linked to said recombinant protein; this allows for the correct assembly and/or folding of such proteins, and the high level accumulation of these recombinant proteins in plants. Exemplary methods concerning the compartmentalization of host proteins into intracellular storage are disclosed in McCormick et al., Proc. Natl. Acad. Sci. USA 96(2):703-708, 1999; Staub et al., Nature Biotechnology 18:333-338, 2000; Conrad et al., Plant Mol. Biol. 38:101-109, 1998; and Stoger et al., Plant Mol. Biol. 42:583-590, 2000, the disclosures of which are incorporated herein by reference in their entireties. Accordingly, one way to achieve the correct assembly and/or folding of recombinant proteins, is to operably link an endoplasmic reticulum signal peptide (ERSP) to the recombinant protein of interest.

[0589] In some embodiments, a peptide comprising an Endoplasmic Reticulum Signal Peptide (ERSP) can be operably linked to a CRIP (designated as ERSP-CRIP), wherein said ERSP is the N-terminal of said peptide, and where the ERSP peptide is between 3 to 60 amino acids in length, between 5 to 50 amino acids in length, between 20 to 30 amino acids in length and or where the peptide is BAAS, or tobacco extensin signal peptide, or a modified tobacco extensin signal peptide, or Jun a 3 signal peptide of Juniperus ashei. For example, in some embodiments, a plant can be transformed with a nucleotide that codes for any of the peptides that are described herein as Endoplasmic Reticulum Signal Peptides (ERSP) and/or a CRIP.

[0590] In some embodiments, a protein comprised of an Endoplasmic Reticulum Signal Peptide (ERSP) can be operably linked to a CRIP, operably linked to an intervening linker peptide (L or Linker), designated as ERSP-L-CRIP, or ERSP-CRIP-L, wherein said ERSP is the N-terminal of said protein, and said L or Linker may be either on the N-terminal side (upstream) of the CRIP or the C-terminal side (downstream) of the CRIP. A protein designated as ERSP-L-CRIP, or ERSP-CRIP-L, comprising any of the ERSPs or CRIPs described herein and wherein said L can be an uncleavable linker peptide, or a cleavable linker peptide, which may be cleavable in a plant cells during protein expression process or may be cleavable in an insect gut environments and hemolymph environments, and comprised of any of the intervening linker peptide (LINKER) described, or taught by this document including the following sequences: IGER (SEQ ID NO:31), EEKKN, (SEQ ID NO:32), and ETMFKHGL (SEQ ID NO:33).

[0591] In some embodiments, a protein comprising an Endoplasmic Reticulum Signal Peptide (ERSP) can be operably linked to a CRIP, which is in turn operably linked to a Translational Stabilizing Protein (STA). Here, this configuration is designated as ERSP-STA-CRIP or ERSP-CRIP-STA, wherein said ERSP is the N-terminal of said protein and said STA may be either on the N-terminal side (upstream) of the CRIP, or of the C-terminal side (downstream) of the CRIP. In some embodiments, a protein designated as ERSP-STA-CRIP or ERSP-CRIP-STA, comprising any of the ERSPs or CRIPs described herein, can be operably linked to a STA, for example, any of the translational stabilizing proteins described, or taught by this document including GFP (Green Fluorescent Protein; SEQ ID NO:34; NCBI Accession No. P42212), or Jun a 3, (Juniperus ashei; SEQ ID NO:36; NCBI Accession No. P81295.1).

[0592] Plants can be transiently or stably transfected with the DNA sequence that encodes a CRIP or an insecticidal protein comprising one or more CRIPs and one or more non-CRIP peptides, polypeptides or proteins, for example, using anyone of the transfection methods described above; alternatively, plants can be transfected with a polynucleotide that encodes a CRIP operably linked to an ERSP, LINKER, and/or a STA protein encoding polynucleotide. For example, in some embodiments, a transgenic plant or plant genome can be transfected to incorporate the polynucleotide sequence that encodes the Endoplasmic Reticulum Signal Peptide (ERSP); CRIP; and/or intervening linker peptide (LINKER, L), thus causing mRNA transcribed from the heterogeneous DNA to be expressed in the transformed plant.

[0593] The present disclosure may be used for transformation of any plant species, including, but not limited to, monocots and dicots. Crops for which a transgenic approach or PEP would be an especially useful approach include, but are not limited to: alfalfa, cotton, tomato, maize, wheat, corn, sweet corn, lucerne, soybean, sorghum, field pea, linseed, safflower, rapeseed, oil seed rape, rice, soybean, barley, sunflower, trees (including coniferous and deciduous), flowers (including those grown commercially and in greenhouses), field lupins, switchgrass, sugarcane, potatoes, tomatoes, tobacco, crucifers, peppers, sugarbeet, barley, and oilseed rape, Brassica sp., rye, millet, peanuts, sweet potato, cassaya, coffee, coconut, pineapple, citrus trees, cocoa, tea, banana, avocado, fig, guava, mango, olive, papaya, cashew, macadamia, almond, oats, vegetables, ornamentals, and conifers.

[0594] In some embodiments, the CRIP expression open reading frame (ORF) described herein is a polynucleotide sequence that will enable the plant to express mRNA, which in turn will be translated into peptides be expressed, folded properly, and/or accumulated to such an extent that said proteins provide a dose sufficient to inhibit and/or kill one or more pests. In one embodiment, an example of a protein CRIP expression ORF can be a cysteine rich insecticidal protein (crip), an “ersp” (i.e., the polynucleotide sequence that encodes the ERSP polypeptide) a “linker” (i.e., the polynucleotide sequence that encodes the LINKER polypeptide), a “sta” (i.e., the polynucleotide sequence that encodes the STA polypeptide), or any combination thereof, and can be described in the following equation format:

ersp-sta-(linkerᵢ−cripⱼ)ₙ, or ersp-(cripⱼ-linkerᵢ)ₙ-sta

[0595] The foregoing illustrative embodiment of a polynucleotide equation would result in the following protein complex being expressed: ERSP-STA-(LINKER_{I}-CRIP_{J})_{N}, containing four possible peptide components with dash signs to separate each component. The nucleotide component of ersp is a polynucleotide segment encoding a plant endoplasmic reticulum trafficking signal peptide (ERSP). The component of sta is a polynucleotide segment encoding a translation stabilizing protein (STA), which helps the accumulation of the CRIP expressed in plants, however, in some embodiments, the inclusion of sta may not be necessary in the CRIP expression ORF. The component of linkerᵢ is a polynucleotide segment encoding an intervening linker peptide (L OR LINKER) to separate the CRIP from other components contained in ORF, and from the translation stabilizing protein. The subscript letter “i” indicates that in some embodiments, different types of linker peptides can be used in the CRIP expression ORF. The component “crip” indicates the polynucleotide segment encoding the CRIP. The subscript “j” indicates different CRIP polynucleotides may be included in the CRIP expression ORF. For example, in some embodiments, the CRIP polynucleotide sequence can encode a CRIP with an amino acid substitution, or an amino acid deletion. The subscript “n” as shown in “(linkerᵢ−cripⱼ)ₙ” indicates that the structure of the nucleotide encoding an intervening linker peptide and a CRIP can be repeated “n” times in the same open reading frame in the same CRIP expression ORF, where “n” can be any integrate number from 1 to 10; “n” can be from 1 to 10, specifically “n” can be 1, 2, 3, 4, or 5, and in some embodiments “n” is 6, 7, 8, 9 or 10. The repeats may contain polynucleotide segments encoding different intervening linkers (LINKER) and different CRIPs. The different polynucleotide segments including the repeats within the same CRIP expression ORF are all within the same translation frame. In some embodiments, the inclusion of a sta polynucleotide in the CRIP expression ORF may not be required. For example, an ersp polynucleotide sequence can be directly be linked to the polynucleotide encoding a CRIP variant polynucleotide without a linker.

[0596] In the foregoing exemplary equation, the polynucleotide “crip” encoding the polypeptide “CRIP” can be the polynucleotide sequence that encodes any CRIP as described herein. For example, in some embodiments, the “crip” polynucleotide can encode a CRIP including, but not limited to, ACTX peptides (e.g., U-ACTX-Hv1a, U+2-ACTX-Hv1a, rU-ACTX-Hv1a, rU-ACTX-Hv1b, rκ-ACTX-Hv1c, ω-ACTX-Hv1a, and/or ω-ACTX-Hv1a+2); Γ-CNTX-Pn1a; U1-agatoxin-Ta1b; TVPs; Av2; Av3; or AVPs. In addition, the foregoing equation can also be used to encode a peptide-IA (e.g., an Insecticidal Agent that lends itself to such methods, e.g., a polymer of amino acids, a peptide or a protein) such as Bt toxins (e.g., Cry toxins, Cyt toxins, or Vips).

[0597] In the foregoing exemplary equation, the polynucleotide “crip” encoding the polypeptide “CRIP” can be the polynucleotide sequence that encodes any CRIP as described herein, e.g., a CRIP comprising an amino acid sequence having at least 50%, at least 55%, at least 60%, at least 65%, at least 70%, at least 75%, at least 80%, at least 81%, at least 82%, at least 83%, at least 84%, at least 85%, at least 86%, at least 87%, at least 88%, at least 89%, at least 90%, at least 91%, at least 92%, at least 93%, at least 94%, at least 95%, at least 96%, at least 97%, at least 98%, at least 99%, at least 99.5%, at least 99.6%, at least 99.7%, at least 99.8%, at least 99.9%, or 100% amino acid sequence identity to: a spider peptide having an amino acid sequence as set forth in any one of SEQ ID NOs: 192-370; an ACTX peptide (e.g., U-ACTX-Hv1a, U+2-ACTX-Hv1a, rU-ACTX-Hv1a, rU-ACTX-Hv1b, K-ACTX-Hv1a, κ+2-ACTX-Hv1a, ω-ACTX-Hv1a, and/or ω+2-ACTX-Hv1a) having an amino acid sequence as set forth in any one of SEQ ID NOs: 60-64, 192-370 and 594; an Γ-CNTX-Pn1a having an amino acid sequence as set forth in any one of SEQ ID NO: 65; a U1-agatoxin-Ta1b peptide having an amino acid sequence as set forth in SEQ ID NO: 1; a U1-agatoxin-Ta1b Variant Polypeptide (TVP) having an amino acid sequence as set forth in any one of SEQ ID NOs: 2-15, 49-53, 2-15, 49-53, 621-622, 624-628, 631-640, 642-651, or 653-654; a scorpion peptide having an amino acid sequence as set forth in any one of SEQ ID NOs: 66, 88-191; a sea anemone peptide having an amino acid sequence as set forth in any one of SEQ ID NOs: 371-411; an Av3 polypeptide from Anemonia viridis having an amino acid sequence as set forth in SEQ ID NO:44; an Av3 variant polypeptide (AVP) having an amino acid sequence as set forth in any one of SEQ ID NOs: 45-47; or a conotoxin.

[0598] In some embodiments, a CRIP ORF starts with an ersp at its 5′-end. For the CRIP to be properly folded and functional when it is expressed from a transgenic plant, it must have an ersp nucleotide fused in frame with the polynucleotide encoding a CRIP. During the cellular translation process, translated ERSP can direct the CRIP being translated to insert into the Endoplasmic Reticulum (ER) of the plant cell by binding with a cellular component called a signal-recognition particle. Within the ER the ERSP peptide is cleaved by signal peptidase and the CRIP is released into the ER, where the CRIP is properly folded during the post-translation modification process, for example, the formation of disulfide bonds. Without any additional retention protein signals, the protein is transported through the ER to the Golgi apparatus, where it is finally secreted outside the plasma membrane and into the apoplastic space. CRIP can accumulate at apoplastic space efficiently to reach the insecticidal dose in plants.

[0599] The ERSP peptide is at the N-terminal region of the plant-translated CRIP complex and the ERSP portion is composed of about 3 to 60 amino acids. In some embodiments it is 5 to 50 amino acids. In some embodiments it is 10 to 40 amino acids but most often is composed of 15 to 20; 20 to 25; or 25 to 30 amino acids. The ERSP is a signal peptide so called because it directs the transportation of a protein. Signal peptides may also be called targeting signals, signal sequences, transit peptides, or localization signals. The signal peptides for ER trafficking are often 15 to 30 amino acid residues in length and have a tripartite organization, comprised of a core of hydrophobic residues flanked by a positively charged amino terminal and a polar, but uncharged carboxyterminal region. (Zimmermann, et al, “Protein translocation across the ER membrane,” Biochimica et Biohysica Acta, 2011, 1808: 912-924).

[0600] Many ERSPs are known. It is NOT required that the ERSP be derived from a plant ERSP, non-plant ERSPs will work with the procedures described herein. Many plant ERSPs are however well known and we describe some plant derived ERSPs here. BAAS, for example, is derived from the plant, Hordeum vulgare, and has the amino acid sequence as follows: MANKHLSLSLFLVLLGLSASLASG (SEQ ID NO:37)

[0601] Plant ERSPs, which are selected from the genomic sequence for proteins that are known to be expressed and released into the apoplastic space of plants, include examples such as BAAS, carrot extensin, and tobacco PR1. The following references provide further descriptions, and are incorporated by reference herein in their entirety. De Loose, M. et al. “The extensin signal peptide allows secretion of a heterologous protein from protoplasts” Gene, 99 (1991) 95-100; De Loose, M. et al. described the structural analysis of an extension—encoding gene from Nicotiana plumbaginifolia, the sequence of which contains a typical signal peptide for translocation of the protein to the endoplasmic reticulum; Chen, M. H. et al. “Signal peptide-dependent targeting of a rice alpha-amylase and cargo proteins to plastids and extracellular compartments of plant cells” Plant Physiology, 2004 July; 135(3): 1367-77. Epub 2004 Jul. 2. Chen, M. H. et al. studied the subcellular localization of α-amylases in plant cells by analyzing the expression of α-amylase, with and without its signal peptide, in transgenic tobacco. These references and others teach and disclose the signal peptide that can be used in the methods, procedures and peptide, protein and nucleotide complexes and constructs described herein.

[0602] The tobacco extensin signal peptide motif is an ERSP (Memelink et al, the Plant Journal, 1993, V4: 1011-1022; see also Pogue G P et al, Plant Biotechnology Journal, 2010, V8: 638-654). In some embodiments, a CRIP ORF can have a tobacco extensin signal peptide motif. In one embodiment, the CRIP ORF can have an extensin motif according to SEQ ID NO:38. In another embodiment, the CRIP ORF can have an extensin motif according to SEQ ID NO:39.

[0603] An illustrative example of how to generate an embodiment with an extensin signal motif is as follows: A DNA sequence encoding an extensin motif is designed (for example, the DNA sequence shown in SEQ ID NO:40 or SEQ ID NO:41) using oligo extension PCR with four synthetic DNA primers; ends sites such as a restriction site, for example, a Pac I restriction site at the 5′-end, and a 5′-end of a GFP sequence at the 3′-end, can be added using PCR with the extensin DNA sequence serving as a template, and resulting in a fragment; the fragment is used as the forward PCR primer to amplify the DNA sequence encoding a CRIP ORF, for example “gfp-l-CRIP” contained in a pFECT vector, thus producing a CRIP ORF encoding (from N′ to C′ terminal) “ERSP-GFP-L-CRIP” wherein the ERSP is extensin. The resulting DNA sequence can then be cloned into Pac I and Avr II restriction sites of a FECT vector to generate the pFECT-CRIP vector for transient plant expression of GFP fused CRIP.

[0604] In some embodiments, an illustrative expression system can include the FECT expression vectors containing CRIP ORF is transformed into Agrobacterium, GV3101, and the transformed GV3101 is injected into tobacco leaves for transient expression of CRIP ORF.

[0605] Translational Stabilizing Protein (STA)

[0606] A Translational stabilizing protein (STA) can increase the amount of CRIP in plant tissues. One of the CRIP ORFs, ERSP-CRIP, is sufficient to express a properly folded CRIP in the transfected plant, but in some embodiments, effective protection of a plant from pest damage may require that the plant expressed CRIP accumulate. With transfection of a properly constructed CRIP ORF, a transgenic plant can express and accumulate greater amounts of the correctly folded CRIP. When a plant accumulates greater amounts of properly folded CRIP, it can more easily resist, inhibit, and/or kill the pests that attack and eat the plants. One method of increasing the accumulation of a polypeptide in transgenic tissues is through the use of a translational stabilizing protein (STA). The translational stabilizing protein can be used to significantly increase the accumulation of CRIP in plant tissue, and thus increase the efficacy of a plant transfected with CRIP with regard to pest resistance. The translational stabilizing protein is a protein with sufficient tertiary structure that it can accumulate in a cell without being targeted by the cellular process of protein degradation. The following equation describes one of the examples of an CRIP ORF that encodes a stabilizing protein fused with U1-agatoxin-Ta1b Variant polynucleotide sequence:

ersp-sta-l-crip or ersp-crip-l-sta

[0607] In some embodiments, the translational stabilizing protein can be a domain of another protein, or it can comprise an entire protein sequence. In some embodiments, the translational stabilizing protein can be between 5 and 50 amino acids, 50 to 250 amino acids (e.g., GNA), 250 to 750 amino acids (e.g., chitinase) and 750 to 1500 amino acids (e.g., enhancin).

[0608] The protein, or protein domain can contain proteins that have no useful characteristics other than translation stabilization, or they can have other useful traits in addition to translational stabilization. One embodiment of the translational stabilizing protein can be a polymer of fusion proteins involving CRIP. A specific example of a translational stabilizing protein is provided here to illustrate the use of a translational stabilizing protein. The example is not intended to limit the disclosure or claims in any way. Useful translational stabilizing proteins are well known in the art, and any proteins of this type could be used as disclosed herein. Procedures for evaluating and testing production of peptides are both known in the art and described herein. One example of one translational stabilizing protein is Green-Fluorescent Protein (GFP) (SEQ ID NO:34; NCBI Accession No. P42212.1).

[0609] Additional examples of translational stabilizing proteins can be found in the following references, the disclosures of which are incorporated by reference in their entirety: Kramer, K. J. et al. “Sequence of a cDNA and expression of the gene encoding epidermal and gut chitinases of Manduca sexta” Insect Biochemistry and Molecular Biology, Vol. 23, Issue 6, September 1993, pp. 691-701. Kramer, K. J. et al. isolated and sequenced a chitinase-encoding cDNA from the tobacco hornworm, Manduca sexta. Hashimoto, Y. et al. “Location and nucleotide sequence of the gene encoding the viral enhancing factor of the Trichoplusia ni granulosis virus” Journal of General Virology, (1991), 72, 2645-2651. Hashimoto, Y. et al. cloned the gene encoding the viral enhancing factor of a Trichoplusia ni granulosis virus and determined the complete nucleotide sequence. These references and others teach and disclose translational stabilizing proteins that can be used in the methods, procedures and peptide, protein and nucleotide complexes and constructs described herein.

[0610] In some embodiments, a CRIP ORF can be transformed into a plant, for example, in the tobacco plant, Nicotiana benthamiana, using a CRIP ORF that contains a STA, for example Jun a 3. The mature Jun a 3 is a ˜30 kDa plant defending protein that is also an allergen for some people. Jun a 3 is produced by Juniperus ashei trees and can be used in some embodiments as a translational stabilizing protein (STA). In some embodiments, the Jun a 3 amino acid sequence can be the sequence shown in SEQ ID NO:36. In other embodiments, the Jun a 3 amino acid sequence can be the sequence shown in SEQ ID NO:42.

[0611] Linkers

[0612] Linker proteins assist in the proper folding of the different motifs composing a CRIP ORF. The CRIP ORF described in this invention also incorporates polynucleotide sequences encoding intervening linker peptides between the polynucleotide sequences encoding the CRIP (crip) and the translational stabilizing protein (sta), or between polynucleotide sequence encoding multiple polynucleotide sequences encoding CRIP, i.e., (l-crip)_{N} or (crip-l)_{N}, if the expression ORF involves multiple CRIP domain expression. The intervening linker peptides (LINKERS or L) separate the different parts of the expressed CRIP complex and help proper folding of the different parts of the complex during the expression process. In the expressed CRIP complex, different intervening linker peptides can be involved to separate different functional domains. In some embodiments, the LINKER is attached to a CRIP and this bivalent group can be repeated up to 10 (N=1-10) and possibly even more than 10 times in order to facilitate the accumulation of properly folded CRIP in the plant that is to be protected.

[0613] In some embodiments the intervening linker peptide can be between 1 and 30 amino acids in length. However, it is not necessarily an essential component in the expressed CRIP in plants. A cleavable linker peptide can be designed to the CRIP ORF to release the properly CRIP from the expressed CRIP complex in the transformed plant to improve the protection the CRIP affords the plant with regard to pest damage. One type of the intervening linker peptide is the plant cleavable linker peptide. This type of linker peptides can be completely removed from the expressed CRIP ORF complex during plant post-translational modification. Therefore, in some embodiments, the properly folded CRIP linked by this type of intervening linker peptides can be released in the plant cells from the expressed CRIP ORF complex during post-translational modification in the plant.

[0614] Another type of the cleavable intervening linker peptide is not cleavable during the expression process in plants. However, it has a protease cleavage site specific to serine, threonine, cysteine, aspartate proteases or metalloproteases. The type of cleavable linker peptide can be digested by proteases found in the insect and lepidopteran gut environment and/or the insect hemolymph and lepidopteran hemolymph environment to release the CRIP in the insect gut or hemolymph. Using the information taught by this disclosure it should be a matter of routine for one skilled in the art to make or find other examples of LINKERS that will be useful in this invention.

[0615] In some embodiments, the CRIP ORF can contain a cleavable type of intervening linker, for example, the type listed in SEQ ID NO:31, having the amino acid code of “IGER” (SEQ ID NO:31). The molecular weight of this intervening linker or LINKER is 473.53 Daltons. In other embodiments, the intervening linker peptide (LINKER) can also be one without any type of protease cleavage site, i.e. an uncleavable intervening linker peptide, for example, the linker “ETMFKHGL” (SEQ ID NO:33).

[0616] In some embodiments, the CRIP-insecticidal protein can have two or more cleavable peptides, wherein the insecticidal protein comprises an insect cleavable linker (L), the insect cleavable linker being fused in frame with a construct comprising (CRIP-L)ₙ, wherein “n” is an integer ranging from 1 to 200, or from 1 to 100, or from 1 to 10. In another embodiment, the CRIP-insecticidal protein, and described herein, comprises an endoplasmic reticulum signal peptide (ERSP) operably linked with a CRIP, which is operably linked with an insect cleavable linker (L) and/or a repeat construct (L-CRIP)ₙ or (CRIP-L)ₙ, wherein n is an integer ranging from 1 to 200, or from 1 to 100, or from 1 to 10.

[0617] In some embodiments, a protein comprising an Endoplasmic Reticulum Signal Peptide (ERSP) can be operably linked to a CRIP and an intervening linker peptide (L or Linker); such a construct is designated as ERSP-L-CRIP, or ERSP-CRIP-L, wherein said ERSP is the N-terminal of said protein, and said L or Linker may be either on the N-terminal side (upstream) of the CRIP, or the C-terminal side (downstream) of the CRIP. A protein designated as ERSP-L-CRIP, or ERSP-CRIP-L, comprising any of the ERSPs or CRIPs described herein, can have a Linker “L” that can be an uncleavable linker peptide, or a cleavable linker peptide, and which may be cleavable in a plant cells during protein expression process, or may be cleavable in an insect gut environment and/or hemolymph environment.

[0618] An exemplary description of the foregoing linkers, and methods of making and using the same, are provided in U.S. Patent Application Publication No. US20180362598A1, the disclosure of which is incorporated herein by reference in its entirety.

[0619] Other examples of intervening linker peptides can be found in the following references, which are incorporated by reference herein in their entirety: A plant expressed serine proteinase inhibitor precursor was found to contain five homogeneous protein inhibitors separated by six same linker peptides in Heath et al. “Characterization of the protease processing sites in a multidomain proteinase inhibitor precursor from Nicotiana alata” European Journal of Biochemistry, 1995; 230: 250-257. A comparison of the folding behavior of green fluorescent proteins through six different linkers is explored in Chang, H. C. et al. “De novo folding of GFP fusion proteins: high efficiency in eukaryotes but not in bacteria” Journal of Molecular Biology, 2005 Oct. 21; 353(2): 397-409. An isoform of the human GalNAc-Ts family, GalNAc-T2, was shown to retain its localization and functionality upon expression in N. benthamiana plants by Daskalova, S. M. et al. “Engineering of N. benthamiana L. plants for production of N-acetylgalactosamine-glycosylated proteins” BMC Biotechnology, 2010 Aug. 24; 10: 62. The ability of endogenous plastid proteins to travel through stromules was shown in Kwok, E. Y. et al. “GFP-labelled Rubisco and aspartate aminotransferase are present in plastid stromules and traffic between plastids” Journal of Experimental Botany, 2004 March; 55(397): 595-604. Epub 2004 Jan. 30. A report on the engineering of the surface of the tobacco mosaic virus (TMV), virion, with a mosquito decapeptide hormone, trypsin-modulating oostatic factor (TMOF) was made by Borovsky, D. et al. “Expression of Aedes trypsin-modulating oostatic factor on the virion of TMV: A potential larvicide” Proc Natl Acad Sci, 2006 Dec. 12; 103(50): 18963-18968. These references and others teach and disclose the intervening linkers that can be used in the methods, procedures and peptide, protein and nucleotide complexes and constructs described herein.

[0620] The CRIP ORF and CRIP constructs

[0621] “CRIP ORF” refers to a nucleotide encoding a CRIP, and/or one or more stabilizing proteins, secretory signals, or target directing signals, for example, ERSP or STA, and is defined as the nucleotides in the ORF that has the ability to be translated. Thus, a “CRIP ORF diagram” refers to the composition of one or more CRIP ORFs, as written out in diagram or equation form. For example, a “CRIP ORF diagram” can be written out as using acronyms or short-hand references to the DNA segments contained within the expression ORF. Accordingly, in one example, a “CRIP ORF diagram” may describe the polynucleotide segments encoding the ERSP, LINKER, STA, and CRIP, by diagramming in equation form the DNA segments as “ersp” (i.e., the polynucleotide sequence that encodes the ERSP polypeptide); “linker” or “L” (i.e., the polynucleotide sequence that encodes the LINKER polypeptide); “sta” (i.e., the polynucleotide sequence that encodes the STA polypeptide), and “crip” (i.e., the polynucleotide sequence encoding a CRIP), respectively. An example of a CRIP ORF diagram is “ersp-sta-(linkerᵢ−cripⱼ)_{N},” or “ersp-(cripⱼ-linkerᵢ)_{N}-sta” and/or any combination of the DNA segments thereof.

[0622] The following equations describe two examples of a CRIP ORF that encodes an ERSP, a STA, a linker, and a CRIP:

ersp-sta-l-crip or ersp-crip-l-sta

[0623] In some embodiments, the CRIP open reading frame (ORF) described herein is a polynucleotide sequence that will enable the plant to express mRNA, which in turn will be translated into peptides that will folded properly, and/or accumulated to such an extent that said proteins provide a dose sufficient to inhibit and/or kill one or more pests. In one embodiment, an example of a protein CRIP ORF can be a polynucleotide encoding a CRIP (crip), an “ersp” (i.e., the polynucleotide sequence that encodes the ERSP polypeptide) a “linker” (i.e., the polynucleotide sequence that encodes the LINKER polypeptide), a “sta” (i.e., the polynucleotide sequence that encodes the STA polypeptide), or any combination thereof, and can be described in the following equation format:

ersp-sta-(linkerᵢ−cripⱼ)ₙ, or ersp-(cripⱼ-linkerᵢ)ₙ-sta

[0624] The foregoing illustrative embodiment of a polynucleotide equation would result in the following protein complex being expressed: ERSP-STA-(LINKER_{I}-CRIP_{J})_{N}, containing four possible peptide components with dash signs to separate each component. The nucleotide component of ersp is a polynucleotide segment encoding a plant endoplasmic reticulum trafficking signal peptide (ERSP). The component of sta is a polynucleotide segment encoding a translation stabilizing protein (STA), which helps the accumulation of the CRIP expressed in plants, however, in some embodiments, the inclusion of sta may not be necessary in the CRIP ORF. The component of linkerᵢ is a polynucleotide segment encoding an intervening linker peptide (L OR LINKER) to separate the CRIP from other components contained in ORF, and from the translation stabilizing protein. The subscript letter “i” indicates that in some embodiments, different types of linker peptides can be used in the CRIP ORF. The component “crip” indicates the polynucleotide segment encoding the CRIP. The subscript “j” indicates different polynucleotides may be included in the CRIP ORF. For example, in some embodiments, the polynucleotide sequence can encode a CRIP with a different amino acid substitution. The subscript “n” as shown in “(linkerᵢ-cripⱼ)ₙ” indicates that the structure of the nucleotide encoding an intervening linker peptide and a CRIP can be repeated “n” times in the same open reading frame in the same CRIP ORF, where “n” can be any integrate number from 1 to 10; “n” can be from 1 to 10, specifically “n” can be 1, 2, 3, 4, or 5, and in some embodiments “n” is 6, 7, 8, 9 or 10. The repeats may contain polynucleotide segments encoding different intervening linkers (LINKER) and different CRIPs. The different polynucleotide segments including the repeats within the same CRIP ORF are all within the same translation frame. In some embodiments, the inclusion of a sta polynucleotide in the CRIP ORF may not be required. For example, an ersp polynucleotide sequence can be directly be linked to the polynucleotide encoding a CRIP variant polynucleotide without a linker.

[0625] In the foregoing exemplary equation, the polynucleotide “crip” encoding the polypeptide “CRIP” can be the polynucleotide sequence that encodes any CRIP as described herein, e.g., a CRIP comprising an amino acid sequence that is at least 50% identical, at least 55% identical, at least 60% identical, at least 65% identical, at least 70% identical, at least 75% identical, at least 80% identical, at least 81% identical, at least 82% identical, at least 83% identical, at least 84% identical, at least 85% identical, at least 86% identical, at least 87% identical, at least 88% identical, at least 89% identical, at least 90% identical, at least 91% identical, at least 92% identical, at least 93% identical, at least 94% identical, at least 95% identical, at least 96% identical, at least 97% identical, at least 98% identical, at least 99% identical, at least 99.5% identical, at least 99.6% identical, at least 99.7% identical, at least 99.8% identical, at least 99.9% identical, or 100% identical to a spider peptide having an amino acid sequence as set forth in any one of SEQ ID NOs: 192-370; an ACTX peptide (e.g., U-ACTX-Hv1a, U+2-ACTX-Hv1a, rU-ACTX-Hv1a, rU-ACTX-Hv1b, κ-ACTX-Hv1a, κ+2-ACTX-Hv1a, ω-ACTX-Hv1a, and/or ω+2-ACTX-Hv1a) having an amino acid sequence as set forth in any one of SEQ ID NOs: 60-64, 192-370 and 594; an Γ-CNTX-Pn1a having an amino acid sequence as set forth in any one of SEQ ID NO: 65; a U1-agatoxin-Ta1b peptide having an amino acid sequence as set forth in SEQ ID NO: 1; a U1-agatoxin-Ta1b Variant Polypeptide (TVP) having an amino acid sequence as set forth in any one of SEQ ID NOs: 2-15, 49-53, 2-15, 49-53, 621-622, 624-628, 631-640, 642-651, or 653-654; a scorpion peptide having an amino acid sequence as set forth in any one of SEQ ID NOs: 66, 88-191; a sea anemone peptide having an amino acid sequence as set forth in any one of SEQ ID NOs: 371-411; an Av3 polypeptide from Anemonia viridis having an amino acid sequence as set forth in SEQ ID NO:44; an Av3 variant polypeptide (AVP) having an amino acid sequence as set forth in any one of SEQ ID NOs: 45-47; or a conotoxin.

[0626] In some embodiments, a polynucleotide is operable to encode a CRIP-insecticidal protein having the following CRIP construct orientation and/or arrangement: ERSP-CRIP; ERSP-(CRIP)_{N}; ERSP-CRIP-L; ERSP-(CRIP)_{N}-L; ERSP-(CRIP-L)_{N}; ERSP-L-CRIP; ERSP-L-(CRIP)_{N}; ERSP-(L-CRIP)_{N}; ERSP-STA-CRIP; ERSP-STA-(CRIP)_{N}; ERSP-CRIP-STA; ERSP-(CRIP)_{N}-STA; ERSP-(STA-CRIP)_{N}; ERSP-(CRIP-STA)_{N}; ERSP-L-CRIP-STA; ERSP-L-STA-CRIP; ERSP-L-(CRIP-STA)_{N}; ERSP-L-(STA-CRIP)_{N}; ERSP-L-(CRIP)_{N}-STA; ERSP-(L-CRIP)_{N}-STA; ERSP-(L-STA-CRIP)_{N}; ERSP-(L-CRIP-STA)_{N}; ERSP-(L-STA)_{N}-CRIP; ERSP-(L-CRIP)_{N}-STA; ERSP-STA-L-CRIP; ERSP-STA-CRIP-L; ERSP-STA-L-(CRIP)_{N}; ERSP-(STA-L)_{N}-CRIP; ERSP-STA-(L-CRIP)_{N}; ERSP-(STA-L-CRIP)_{N}; ERSP-STA-(CRIP)_{N}-L; ERSP-STA-(CRIP-L)_{N}; ERSP-(STA-CRIP)_{N}-L; ERSP-(STA-CRIP-L)_{N}; ERSP-CRIP-L-STA; ERSP-CRIP-STA-L; ERSP-(CRIP)_{N}-STA-L ERSP-(CRIP-L)_{N}-STA; ERSP-(CRIP-STA)_{N}-L; ERSP-(CRIP-L-STA)_{N}; or ERSP-(CRIP-STA-L)_{N}; wherein N is an integer ranging from 1 to 200.

[0627] In some embodiments, any of the CRIP ORFs and/or CRIP constructs described herein can be produced recombinantly, e.g., in some embodiments, any of the CRIP ORFs and/or CRIP constructs described herein can be produced in cell culture, e.g., by a yeast cell.

[0628] Any of the aforementioned methods, and/or any of the methods described herein, can be used to incorporate into a plant or a plant part thereof, one or more polynucleotides operable to express any one or more of the CRIPs or CRIP-insecticidal proteins as described herein; e.g., one or more CRIPs or CRIP-insecticidal protein having the amino acid sequence of SEQ ID NOs: 2-15, 49-53, or 77-110, which are likewise described herein.

[0629] The present disclosure may be used for transformation of any plant species, including, but not limited to, monocots and dicots. Crops for which a transgenic approach or PEP would be an especially useful approach include, but are not limited to: alfalfa, cotton, tomato, maize, wheat, corn, sweet corn, lucerne, soybean, sorghum, field pea, linseed, safflower, rapeseed, oil seed rape, rice, soybean, barley, sunflower, trees (including coniferous and deciduous), flowers (including those grown commercially and in greenhouses), field lupins, switchgrass, sugarcane, potatoes, tomatoes, tobacco, crucifers, peppers, sugarbeet, barley, and oilseed rape, Brassica sp., rye, millet, peanuts, sweet potato, cassaya, coffee, coconut, pineapple, citrus trees, cocoa, tea, banana, avocado, fig, guava, mango, olive, papaya, cashew, macadamia, almond, oats, vegetables, ornamentals, and conifers.

[0630] Transforming Plants with Polynucleotides

[0631] In some embodiments, the CRIP ORFs and CRIP constructs described above and herein can be cloned into any plant expression vector for the CRIP to be expression in plants, either transiently or stably.

[0632] Transient plant expression systems can be used to promptly optimize the structure of the CRIP ORF for some specific CRIP expression in plants, including the necessity of some components, codon optimization of some components, optimization of the order of each component, etc. A transient plant expression vector is often derived from a plant virus genome. Plant virus vectors provide advantages in quick and high level of foreign gene expression in plant due to the infection nature of plant viruses. The full length of the plant viral genome can be used as a vector, but often a viral component is deleted, for example the coat protein, and transgenic ORFs are subcloned in that place. The CRIP ORF can be subcloned into such a site to create a viral vector. These viral vectors can be introduced into plant mechanically since they are infectious themselves, for example through plant wound, spray-on etc. They can also be transfected into plants via agroinfection, by cloning the virus vector into the T-DNA of the crown gall bacterium, Agrobacterium tumefaciens, or the hairy root bacterium, Agrobacterium rhizogenes. The expression of the CRIP in this vector is controlled by the replication of the RNA virus, and the virus translation to mRNA for replication is controlled by a strong viral promoter, for example, 35S promoter from Cauliflower mosaic virus. Viral vectors with CRIP ORF are usually cloned into T-DNA region in a binary vector that can replicate itself in both E. coli strains and Agrobacterium strains. The transient transfection of a plant can be done by infiltration of the plant leaves with the Agrobacterium cells which contain the viral vector for CRIP expression. In the transient transformed plant, it is common for the foreign protein expression to be ceased in a short period of time due to the post-transcriptional gene silencing (PTGS). Sometimes a PTGS suppressing protein gene is necessary to be co-transformed into the plant transiently with the same type of viral vector that drives the expression of with the CRIP ORF. This improves and extends the expression of the CRIP in the plant. The most commonly used PTGS suppressing protein is P19 protein discovered from tomato bushy stunt virus (TBSV).

[0633] In some embodiments, transient transfection of plants can be achieved by recombining a polynucleotide encoding a CRIP with any one of the readily available vectors (see above), and confirmed, using a marker or signal (e.g., GFP emission). In some embodiments, a transiently transfected plant can be created by recombining a polynucleotide encoding a CRIP with a DNA encoding a GFP-Hybrid fusion protein in a vector, and transfection said vector into a plant (e.g., tobacco) using different FECT vectors designed for targeted expression. In some embodiments, a polynucleotide encoding a CRIP can be recombined with a pFECT vector for APO (apoplast localization) accumulation; a pFECT vector for CYTO (cytoplasm localization) accumulation; or pFECT with ersp vector for ER (endoplasm reticulum localization) accumulation.

[0634] An exemplary transient plant transformation strategy is agroinfection using a plant viral vector due to its high efficiency, ease, and low cost. In some embodiments, a tobacco mosaic virus overexpression system (see TRBO, Lindbo J A, Plant Physiology, 2007, V145: 1232-1240) can be used to transiently transform plants with CRIP. The TRBO DNA vector has a T-DNA region for agroinfection, which contains a CaMV 35S promoter that drives expression of the tobacco mosaic virus RNA without the gene encoding the viral coating protein. Moreover, this system uses the “disarmed” virus genome, therefore viral plant to plant transmission can be effectively prevented.

[0635] In another embodiment, the FECT viral transient plant expression system can be used to transiently transform plants with CRIP (see Liu Z & Kearney C M, BMC Biotechnology, 2010, 10:88). The FECT vector contains a T-DNA region for agroinfection, which contains a CaMV 35S promoter that drives the expression of the foxtail mosaic virus RNA without the genes encoding the viral coating protein and the triple gene block. Moreover, this system uses the “disarmed” virus genome, therefore viral plant to plant transmission can be effectively prevented. To efficiently express the introduced heterologous gene, the FECT expression system additionally needs to co-express P19, a RNA silencing suppressor protein from tomato bushy stunt virus, to prevent the post-transcriptional gene silencing (PTGS) of the introduced T-DNA. (The TRBO expression system does not need co-expression of P19).

[0636] In some embodiments, the CRIP ORF can be designed to encode a series of translationally fused structural motifs that can be described as follows: N′-ERSP-STA-L-CRIP-C′ wherein the “N′” and “C′” indicating the N-terminal and C-terminal amino acids, respectively, and the ERSP motif can be the Barley Alpha-Amylase Signal peptide (BAAS) (SEQ ID NO:37); the stabilizing protein (STA) can be GFP (SEQ ID NO:34); the linker peptide “L” can be IGER (SEQ ID NO:31) In some embodiments, the ersp-sta-l-CRIP ORF can chemically synthesized to include restrictions sites, for example a Pac I restriction site at its 5′-end, and an Avr II restriction site at its 3′-end. In some embodiments, the CRIP ORF can be cloned into the Pac I and Avr II restriction sites of a FECT expression vector (pFECT) to create an U1-agatoxin-Ta1b variant expression vector for the FECT transient plant expression system (pFECT-CRIP). To maximize expression in the FECT expression system, some embodiments may have a FECT vector expressing the RNA silencing suppressor protein P19 (pFECT-P19) generated for co-transformation.

[0637] In some embodiments, a U1-agatoxin-Ta1b variant expression vector can be recombined for use in a TRBO transient plant expression system, for example, by performing a routine PCR procedure and adding a Not I restriction site to the 3′-end of the CRIP ORF described above, and then cloning the CRIP ORF into Pac I and Not I restriction sites of the TRBO expression vector (pTRBO-CRIP).

[0638] In some embodiments, an Agrobacterium tumefaciens strain, for example, commercially available GV3101 cells, can be used for the transient expression of a CRIP ORF in a plant tissue (e.g., tobacco leaves) using one or more transient expression systems, for example, the FECT and TRBO expression systems. An exemplary illustration of such a transient transfection protocol includes the following: an overnight culture of GV3101 can be used to inoculate 200 mL Luria-Bertani (LB) medium; the cells can be allowed to grow to log phase with OD600 between 0.5 and 0.8; the cells can then be pelleted by centrifugation at 5000 rpm for 10 minutes at 4° C.; cells can then be washed once with 10 mL pre-chilled TE buffer (Tris-HCl 10 mM, EDTA 1 mM, pH8.0), and then resuspended into 20 mL LB medium; GV3101 cell resuspension can then be aliquoted in 250 μL fractions into 1.5 mL microtubes; aliquots can then be snap-frozen in liquid nitrogen and stored at −80° C. freezer for future transformation. The pFECT-CRIP and pTRBO-CRIP vectors can then transformed into the competent GV3101 cells using a freeze-thaw method as follows: the stored competent GV3101 cells are thawed on ice and mixed with 1 to 5 μg pure DNA (pFECT-CRIP or pTRBO-CRIP vector). The cell-DNA mixture is kept on ice for 5 minutes, transferred to −80° C. for 5 minutes, and incubated in a 37° C. water bath for 5 minutes. The freeze-thaw treated cells are then diluted into 1 mL LB medium and shaken on a rocking table for 2 to 4 hours at room temperature. A 200 μL aliquot of the cell-DNA mixture is then spread onto LB agar plates with the appropriate antibiotics (10 μg/mL rifampicin, 25 μg/mL gentamycin, and 50 μg/mL kanamycin can be used for both pFECT-CRIP transformation and pTRBO-CRIP transformation) and incubated at 28° C. for two days. Resulting transformed colonies are then picked and cultured in 6 mL aliquots of LB medium with the appropriate antibiotics for transformed DNA analysis and making glycerol stocks of the transformed GV3101 cells.

[0639] In some embodiments, the transient transformation of plant tissues, for example, tobacco leaves, can be performed using leaf injection with a 3-mL syringe without needle. In one illustrative example, the transformed GV3101 cells are streaked onto an LB plate with the appropriate antibiotics (as described above) and incubated at 28° C. for two days. A colony of transformed GV3101 cells are inoculated to 5 ml of LB-MESA medium (LB media supplemented with 10 mM IVIES, and 20 μM acetosyringone) and the same antibiotics described above, and grown overnight at 28° C. The cells of the overnight culture are collected by centrifugation at 5000 rpm for 10 minutes and resuspended in the induction medium (10 mM MES, 10 mM MgCl₂, 100 μM acetosyringone) at a final OD600 of 1.0. The cells are then incubated in the induction medium for 2 hours to overnight at room temperature and are then ready for transient transformation of tobacco leaves. The treated cells can be infiltrated into the underside of attached leaves of Nicotiana benthamiana plants by injection, using a 3-mL syringe without a needle attached.

[0640] In some embodiments, the transient transformation can be accomplished by transfecting one population of GV3101 cells with pFECT-CRIP or pTRBO-CRIP and another population with pFECT-P19, mixing the two cell populations together in equal amounts for infiltration of tobacco leaves by injection with a 3-mL syringe.

[0641] Stable integration of polynucleotide operable to encode CRIP is also possible with the present disclosure, for example, the CRIP ORF can also be integrated into plant genome using stable plant transformation technology, and therefore CRIPs can be stably expressed in plants and protect the transformed plants from generation to generation. For the stable transformation of plants, the CRIP expression vector can be circular or linear. The CRIP ORF, the CRIP expression cassette, and/or the vector with polynucleotide encoding an CRIP for stable plant transformation should be carefully designed for optimal expression in plants based on what is known to those having ordinary skill in the art, and/or by using predictive vector design tools such as Gene Designer 2.0 (Atum Bio); VectorBuilder (Cyagen); SnapGene® viewer; GeneArt™ Plasmid Construction Service (Thermo-Fisher Scientific); and/or other commercially available plasmid design services. See Tolmachov, Designing plasmid vectors. Methods Mol Biol. 2009; 542:117-29. The expression of CRIP is usually controlled by a promoter that promotes transcription in some, or all the cells of the transgenic plant. The promoter can be a strong plant viral promoter, for example, the constitutive 35S promoter from Cauliflower Mosaic Virus (CaMV); it also can be a strong plant promoter, for example, the hydroperoxide lyase promoter (pHPL) from Arabidopsis thaliana; the Glycine max polyubiquitin (Gmubi) promoter from soybean; the ubiquitin promoters from different plant species (rice, corn, potato, etc.), etc. A plant transcriptional terminator often occurs after the stop codon of the ORF to halt the RNA polymerase and transcription of the mRNA. To evaluate the CRIPs expression, a reporter gene can be included in the CRIP expression vector, for example, beta-glucuronidase gene (GUS) for GUS straining assay, green fluorescent protein (GFP) gene for green fluorescence detection under UV light, etc. For selection of transformed plants, a selection marker gene is usually included in the CRIP expression vector. In some embodiments, the marker gene expression product can provide the transformed plant with resistance to specific antibiotics, for example, kanamycin, hygromycin, etc., or specific herbicide, for example, glyphosate etc. If agroinfection technology is adopted for plant transformation, T-DNA left border and right border sequences are also included in the CRIP expression vector to transport the T-DNA portion into the plant.

[0642] The constructed CRIP expression vector can be transfected into plant cells or tissues using many transfection technologies. Agroinfection is a very popular way to transform a plant using an Agrobacterium tumefaciens strain or an Agrobacterium rhizogenes strain. Particle bombardment (also called Gene Gun, or Biolistics) technology is also very common method of plant transfection. Other less common transfection methods include tissue electroporation, silicon carbide whiskers, direct injection of DNA, etc. After transfection, the transfected plant cells or tissues placed on plant regeneration media to regenerate successfully transfected plant cells or tissues into transgenic plants.

[0643] Evaluation of a transformed plant can be accomplished at the DNA level, RNA level and protein level. A stably transformed plant can be evaluated at all of these levels and a transiently transformed plant is usually only evaluated at protein level. To ensure that the CRIP ORF integrates into the genome of a stably transformed plant, the genomic DNA can be extracted from the stably transformed plant tissues for and analyzed using PCR or Southern blot. The expression of the CRIP in the stably transformed plant can be evaluated at the RNA level, for example, by analyzing total mRNA extracted from the transformed plant tissues using northern blot or RT-PCR. The expression of the CRIP in the transformed plant can also be evaluated in protein level directly. There are many ways to evaluate expression of CRIP in a transformed plant. If a reporter gene included in the CRIP ORF, a reporter gene assay can be performed, for example, in some embodiments a GUS straining assay for GUS reporter gene expression, a green fluorescence detection assay for GFP reporter gene expression, a luciferase assay for luciferase reporter gene expression, and/or other reporter techniques may be employed.

[0644] In some embodiments total protein can be extracted from the transformed plant tissues for the direct evaluation of the expression of the CRIP using a Bradford assay to evaluate the total protein level in the sample.

[0645] In some embodiments, analytical HPLC chromatography technology, Western blot technique, or iELISA assay can be adopted to qualitatively or quantitatively evaluate the CRIP in the extracted total protein sample from the transformed plant tissues. CRIP expression can also be evaluated by using the extracted total protein sample from the transformed plant tissues in an insect bioassay, for example, in some embodiments, the transformed plant tissue or the whole transformed plant itself can be used in insect bioassays to evaluate CRIP expression and its ability to provide protection for the plant.

[0646] In some embodiments, a plant, plant tissue, plant cell, plant seed, or part thereof of the present invention, can comprise one or more CRIPs, or a polynucleotide encoding the same.

[0647] In some embodiments, a plant, plant tissue, plant cell, plant seed, or part thereof of the present invention, can comprise one or more CRIPs, or a polynucleotide encoding the same, wherein said CRIP is any CRIP as described herein. For example, in some embodiments, a plant, plant tissue, plant cell, plant seed, or part thereof, can comprise a CRIP including, but not limited to, one or more of the following: ACTX peptides (e.g., U-ACTX-Hv1a, U+2-ACTX-Hv1a, rU-ACTX-Hv1a, rU-ACTX-Hv1b, rκ-ACTX-Hv1c, co-ACTX-Hv1a, and/or ω-ACTX-Hv1a+2); Γ-CNTX-Pn1a; U1-agatoxin-Ta1b; TVPs; Av2; Av3; or AVPs. In addition, the methods and techniques can be used to create a plant, plant tissue, plant cell, plant seed, or part thereof, comprising a peptide-IA (e.g., an Insecticidal Agent that lends itself to such methods, e.g., a polymer, a peptide or a protein) such as Bt toxins (e.g., Cry toxins, Cyt toxins, or Vips).

[0648] In some embodiments, a plant, plant tissue, plant cell, plant seed, or part thereof of the present invention, can comprise one or more CRIPs, or a polynucleotide encoding the same, wherein said CRIP may comprise an amino acid sequence having at least 50%, at least 55%, at least 60%, at least 65%, at least 70%, at least 75%, at least 80%, at least 81%, at least 82%, at least 83%, at least 84%, at least 85%, at least 86%, at least 87%, at least 88%, at least 89%, at least 90%, at least 91%, at least 92%, at least 93%, at least 94%, at least 95%, at least 96%, at least 97%, at least 98%, at least 99%, at least 99.5%, at least 99.6%, at least 99.7%, at least 99.8%, at least 99.9%, or 100% amino acid sequence identity to: a spider peptide having an amino acid sequence as set forth in any one of SEQ ID NOs: 192-370; an ACTX peptide (e.g., U-ACTX-Hv1a, U+2-ACTX-Hv1a, rU-ACTX-Hv1a, rU-ACTX-Hv1b, κ-ACTX-Hv1a, κ+2-ACTX-Hv1a, ω-ACTX-Hv1a, and/or ω+2-ACTX-Hv1a) having an amino acid sequence as set forth in any one of SEQ ID NOs: 60-64, 192-370 and 594; an F-CNTX-Pn1a having an amino acid sequence as set forth in any one of SEQ ID NO: 65; a U1-agatoxin-Ta1b peptide having an amino acid sequence as set forth in SEQ ID NO: 1; a U1-agatoxin-Ta1b Variant Polypeptide (TVP) having an amino acid sequence as set forth in any one of SEQ ID NOs: 2-15, 49-53, 2-15, 49-53, 621-622, 624-628, 631-640, 642-651, or 653-654; a scorpion peptide having an amino acid sequence as set forth in any one of SEQ ID NOs: 66, 88-191; a sea anemone peptide having an amino acid sequence as set forth in any one of SEQ ID NOs: 371-411; an Av3 polypeptide from Anemonia viridis having an amino acid sequence as set forth in SEQ ID NO:44; an Av3 variant polypeptide (AVP) having an amino acid sequence as set forth in any one of SEQ ID NOs: 45-47; or a conotoxin.

[0649] Confirming Successful Transformation with CRIPs

[0650] Following introduction of heterologous foreign DNA into plant cells, the transformation or integration of heterologous gene in the plant genome is confirmed by various methods such as analysis of nucleic acids, proteins and metabolites associated with the integrated gene.

[0651] PCR analysis is a rapid method to screen transformed cells, tissue or shoots for the presence of incorporated gene at the earlier stage before transplanting into the soil (Sambrook and Russell (2001) Molecular Cloning: A Laboratory Manual. Cold Spring Harbor Laboratory Press, Cold Spring Harbor, N.Y.). PCR is carried out using oligonucleotide primers specific to the gene of interest or Agrobacterium vector background, etc.

[0652] Plant transformation may be confirmed by Southern blot analysis of genomic DNA (Sambrook and Russell, 2001, supra). In general, total DNA is extracted from the transformed plant, digested with appropriate restriction enzymes, fractionated in an agarose gel and transferred to a nitrocellulose or nylon membrane. The membrane or “blot” is then probed with, for example, radiolabeled ³²P target DNA fragment to confirm the integration of introduced gene into the plant genome according to standard techniques (Sambrook and Russell, 2001, supra).

[0653] In Northern blot analysis, RNA is isolated from specific tissues of transformed plant, fractionated in a formaldehyde agarose gel, and blotted onto a nylon filter according to standard procedures that are routinely used in the art (Sambrook and Russell, 2001, supra). Expression of RNA encoded by the polynucleotide encoding a CRIP is then tested by hybridizing the filter to a radioactive probe derived from a CRIP, by methods known in the art (Sambrook and Russell, 2001, supra).

[0654] Western blot, biochemical assays and the like may be carried out on the transgenic plants to confirm the presence of protein encoded by the CRIP gene by standard procedures (Sambrook and Russell, 2001, supra) using antibodies that bind to one or more epitopes present on the CRIP.

[0655] A number of markers have been developed to determine the success of plant transformation, for example, resistance to chloramphenicol, the aminoglycoside G418, hygromycin, or the like. Other genes that encode a product involved in chloroplast metabolism may also be used as selectable markers. For example, genes that provide resistance to plant herbicides such as glyphosate, bromoxynil, or imidazolinone may find particular use. Such genes have been reported (Stalker et al. (1985) J. Biol. Chem. 263:6310-6314 (bromoxynil resistance nitrilase gene); and Sathasivan et al. (1990) Nucl. Acids Res. 18:2188 (AHAS imidazolinone resistance gene). Additionally, the genes disclosed herein are useful as markers to assess transformation of bacterial, yeast, or plant cells. Methods for detecting the presence of a transgene in a plant, plant organ (e.g., leaves, stems, roots, etc.), seed, plant cell, propagule, embryo or progeny of the same are well known in the art. In one embodiment, the presence of the transgene is detected by testing for pesticidal activity.

[0656] Fertile plants expressing a CRIP and/or U1-agatoxin-Ta1b variant polynucleotide may be tested for pesticidal activity, and the plants showing optimal activity selected for further breeding. Methods are available in the art to assay for pest activity. Generally, the protein is mixed and used in feeding assays. See, for example Marrone et al. (1985) J. of Economic Entomology 78:290-293.

[0657] In some embodiments, evaluating the success of a transient transfection procedure can be determined based on the expression of a reporter gene, for example, GFP. In some embodiments, GFP can be detected under U.V. light in tobacco leaves transformed with the FECT and/or TRBO vectors.

[0658] In some embodiments, CRIP expression can be quantitatively evaluated in a plant (e.g., tobacco). An exemplary procedure that illustrates CRIP quantification in a tobacco plant is as follows: 100 mg disks of transformed leaf tissue is collected by punching leaves with the large opening of a 1000 μL pipette tip. The collected leaf tissue is place into a 2 mL microtube with 5/32″ diameter stainless steel grinding balls, and frozen in −80° C. for 1 hour, and then homogenized using a Troemner-Ta1boys High Throughput Homogenizer. Next, 750 μL ice-cold TSP-SE1 extraction solutions (sodium phosphate solution 50 mM, 1:100 diluted protease inhibitor cocktail, EDTA 1 mM, DIECA 10 mM, PVPP 8%, pH 7.0) is added into the tube and vortexed. The microtube is then left still at room temperature for 15 minutes and then centrifuged at 16,000 g for 15 minutes at 4° C.; 100 μL of the resulting supernatant is taken and loaded into pre-Sephadex G-50-packed column in 0.45 μm Millipore Multi Screen filter microtiter plate with empty receiving Costar microtiter plate on bottom. The microtiter plates are then centrifuged at 800 g for 2 minutes at 4° C. The resulting filtrate solution, herein called total soluble protein extract (TSP extract) of the tobacco leaves, is then ready for the quantitative analysis.

[0659] In some embodiments, the total soluble protein concentration of the TSP extract can be estimated using Pierce Coomassie Plus protein assay. BSA protein standards with known concentrations can be used to generate a protein quantification standard curve. For example, 2 μL of each TSP extract can be mixed into 200 μL of the chromogenic reagent (CPPA reagent) of the Coomassie Plus protein assay kits and incubated for 10 minutes. The chromogenic reaction can then be evaluated by reading OD595 using a SpectroMax-M2 plate reader using SoftMax Pro as control software. The concentrations of total soluble proteins can be about 0.788±0.20 μg/μL or about 0.533±0.03 μg/μL in the TSP extract from plants transformed via FECT and TRBO, respectively, and the results can be used to calculate the percentage of the expressed U1-agatoxin-Ta1b Variant peptide in the TSP (% TSP) for the iELISA assay

[0660] In some embodiments, an indirect ELISA (iELISA) assay can be used to quantitatively evaluate the CRIP content in the tobacco leaves transiently transformed with the FECT and/or TRBO expression systems. An illustrative example of using iELISA to quantify CRIP is as follows: 5 μL of the leaf TSP extract is diluted with 95 μL of CB2 solution (Immunochemistry Technologies) in the well of an Immulon 2HD 96-well plate, with serial dilutions performed as necessary; leaf proteins obtained from extract samples are then allowed to coat the well walls for 3 hours in the dark, at room temperature, and the CB2 solution is then subsequently removed; each well is washed twice with 200 μL PBS (Gibco); 150 μL blocking solution (Block BSA in PBS with 5% non-fat dry milk) is added into each well and incubated for 1 hour, in the dark, at room temperature; after the removal of the blocking solution, a PBS wash of the wells, 100 μL of primary antibodies directed against CRIP (custom antibodies are commercially available from ProMab Biotechnologies, Inc.; GenScript®; or raised using the knowledge readily available to those having ordinary skill in the art); the antibodies diluted at 1: 250 dilution in blocking solution are added to each well and incubated for 1 hour in the dark at room temperature; the primary antibody is removed and each well is washed with PBS 4 times; 100 μL of HRP-conjugated secondary antibody (i.e., antibody directed against host species used to generate primary antibody, used at 1: 1000 dilution in the blocking solution) is added into each well and incubated for 1 hour in the dark at room temperature; the secondary antibody is removed and the wells are washed with PBS, 100 μL; substrate solution (a 1: 1 mixture of ABTS peroxidase substrate solution A and solution B, KPL) is added to each well, and the chromogenic reaction proceeds until sufficient color development is apparent; 100 μL of peroxidase stop solution is added to each well to stop the reaction; light absorbance of each reaction mixture in the plate is read at 405 nm using a SpectroMax-M2 plate reader, with SoftMax Pro used as control software; serially diluted known concentrations of pure CRIPs samples can be treated in the same manner as described above in the iELISA assay to generate a mass-absorbance standard curve for quantities analysis. The expressed CRIP can be detected by iELISA at about 3.09±1.83 ng/μL in the leaf TSP extracts from the FECT transformed tobacco; and about 3.56±0.74 ng/μL in the leaf TSP extract from the TRBO transformed tobacco. Alternatively, the expressed CRIP can be about 0.40% total soluble protein (% TSP) for FECT transformed plants and about 0.67% TSP in TRBO transformed plants.

[0661] Insecticidal Agents (IAs)

[0662] Insecticidal Agents (IAs) are chemical substances, molecules, nucleotides, polynucleotides, peptides, polypeptides, proteins, toxins, toxicants, poisons, insecticides, pesticides, organic compounds, inorganic compounds, prokaryote organisms, or eukaryote organisms (and the agents produced from said prokaryote or eukaryote organisms), that possess at least some insecticidal activity.

[0663] In some embodiments, an IA can be any one or more chemical substances, molecules, nucleotides, polynucleotides, peptides, polypeptides, proteins, poisons, insecticides, pesticides, organic compounds, inorganic compounds, or combinations thereof, that exhibit insecticidal activity.

[0664] In some embodiments, an IA can be a prokaryote organism, eukaryote organism, or the agents produced therefrom, that exhibit insecticidal activity.

[0665] In some embodiments, an IA includes, but is not limited to, members selected from the categories of: RNAi; Stomach poisons; Inhibitors of chitin biosynthesis type 0; Inhibitors of chitin biosynthesis, type 1; Insect viruses; Compounds isolated from Azadirachta indica; Compounds with unknown MOAs; Bacteria (and products therefrom); Fungi (and products therefrom); Nematodes (and products therefrom); Botanical essences; Mechanical disruptors; Fluorescent brighteners; Silica nanospheres; Chitinases; Lectins; Membrane Attack Complex/Perforin (MACPF) proteins; Plant virus coat protein-toxin fusions; Glycan binding domain/toxin fusion proteins; Acetylcholinesterase (AchE) inhibitors; GABA-gated chloride channel blockers; Sodium channel modulators; Nicotinic acetylcholine receptor (nAchR) Competitive Modulators; Nicotinic acetylcholine receptor (nAchR) allosteric modulators—site I; Glutamate-gated chloride channel (GluCl) allosteric modulators; Juvenile hormone mimics; Miscellaneous non-specific (multi-site) inhibitors; Chordotonal organ TRPV channel modulators; Mite growth inhibitors; Inhibitors of mitochondrial ATP synthase; Uncouplers of oxidative phosphorylation via disruption of the proton gradient; Nicotinic acetylcholine receptor (nAchR) channel blockers; Moulting disruptors (dipteran); Ecdysone receptor agonists; Octopamine receptor agonists; Mitochondrial complex III electron transport inhibitors; Mitochondrial complex I electron transport inhibitors; Voltage-dependent sodium channel blockers; Inhibitors of acetyl co-enzyme A carboxylase; Mitochondrial complex IV electron transport inhibitors; Mitochondrial complex II electron transport inhibitors; Ryanodine receptor modulators; Chordotonal organ modulators—undefined target site; or GABA-gated chloride channel allosteric modulators.

[0666] In some preferred embodiments, an Insecticidal Agent (IA) can be selected from the following: RNAi: such as dsRNA (e.g., WupA dsRNA); Stomach poisons: e.g., arsenicals such as “Paris green” or copper acetoarsenite, lead arsenate, calcium arsenate; fluorine compounds (e.g., sodium fluoride); borates (e.g., borax, boric acid, disodium octaborate, sodium borate, sodium metaborate, sodium tetraborate decahydrate, boron oxide, boron carbide, boron nitride, boron tribromide, boron trichloride, or boron trifluoride);

[0667] Inhibitors of chitin biosynthesis type 0: e.g., benzoylureas (e.g., bistrifluron, chlorfluazuron, diflubenzuron, flucycloxuron, flufenoxuron, hexaflumuron, lufenuron, novaluron, noviflumuron, teflubenzuron, or triflumuron); Inhibitors of chitin biosynthesis, type 1: e.g., buprofezin; Insect viruses: e.g., Baculoviridae viruses (e.g., Betabaculoviruses such as granuloviruses (GVs) and nucleopolyhedroviruses (NPVS), e.g., Cydia pomonella GV, Thaumatotibia leucotreta GV, Anticarsia gemmatalis MNPV, or Helicoverpa armigera NPV); and Parvoviridae viruses (e.g., Junonia coenia densovirus (JcDNV)); Compounds isolated from Azadirachta indica: e.g., Azadirachtin; Azadiradione; Azadiradionolide; Deacetylgedunin; Deacetylazadirachtinol; Desfuranoazadiradione; Epoxyazadiradione; Gedunin; Mahmoodin; Neemfruitin A; Neemfruitin B; Nimbolide; Nimbin; Nimolicinol; Ohchinin Acetate; Salannin; Salannol; alpha-Nimolactone; beta-Nimolactone; 2′,3′-Dihydrosalannin; 3-Deacetylsalannin; 6-Deacetylnimbin; 7-Acetyl-16,17-dehydro-16-hydroxyneotrichilenone; 7-Benzoylnimbocinol; 7-Deacetyl-7-benzoylepoxyazadiradione; 7-Deacetyl-7-benzoylgedunin; 7-Deacetyl-17-epinimolicinol; 15-Hydroxyazadiradione; 17-Epi-17-Hydroxyazadiradione; 17-Epiazadiradione; 20,21,22,23-Tetrahydro-23-oxoazadirone; 22,23-Dihydronimocinol; or 28-Deoxonimbolide; Compounds with unknown MOAs: e.g., benzoximate, bromopropylate, chinomethionat, dicofol, lime sulfur, pyridalyl, or sulfur; Bacteria: including the fermentation solids, spores, toxins, and/or products therefrom, e.g., Brevibacillus brevis; Brevibacillus brevis toxins (e.g., TIC4670 Beta pore forming protein); Alcaligenes faecalis; Alcaligenes faecalis toxins (e.g., AfIP-1A/1B); Pseudomonas chlororaphis; Pseudomonas chlororaphis toxins (e.g., PIP-72Aa); Yersinia entomophaga (e.g., Yersinia entomophaga MH96); Yersinia nurmii; Photorhabdus luminescens; Photorhabdus luminescens toxin complexes (Tca); Burkholderia spp, or Wolbachie pipientis; Bacillus thuringiensis (e.g., Bacillus thuringiensis var. israelensis, Bacillus thuringiensis var. aizawai, Bacillus thuringiensis var. kurstaki, Bacillus thuringiensis var. tenebrionensis; or Bacillus sphaericus); Bacillus thuringiensis toxins, e.g., parasporal crystal toxins (e.g., δ-endotoxins such as Cry toxins, Cyt toxins); or secreted protein (e.g., vegetative insecticidal proteins (Vips), secreted insecticidal proteins (Sips), Bin-like family proteins, or ETX_MTX2-family proteins); Fungi: including parts and/or products thereof, e.g., Ascomycete fungi, such as a fungi in the Cordycipitaceae family (e.g., a Beauveria bassiana or Cordyceps bassiana, and/or the toxins therefrom); Metarhizium anisopliae (e.g., strain F52) and the products therefrom; or Paecilomyces fumosoroseus (e.g., Apopka strain 97) and the products therefrom, or nematode Steinernema glaseri and the products thereof; Nematodes: e.g., Steinernema glaseri or Heterorhabditis bacteriophora; Botanical essences: including synthetics and/or extracts or unrefined oils, such as Dysphania ambrosioides or near ambrosioides extract, fatty acid monoesters with glycerol or propanediol Neem oil; Mechanical disruptors: such as Diatomaceous earth, minerals, and/or synthetic/natural fibers; Fluorescent brighteners: e.g., Calcofluor White M2R; Silica nanospheres: e.g., NanoXact Silica Nanospheres; Chitinases: e.g., chitinase from Streptomyces griseus; Lectins: e.g., Galanthus nivalis agglutinin (GNA); Sambucus nigra lectin (SNA); Maackia amurensis-II (MAL-II); Erythrina cristagalli lectin (ECL); Ricinus communis agglutinin-I (RCA); peanut agglutinin (PNA); wheat germ agglutinin (WGA); Griffonia (GSL-II); Con A; Lens culinaris agglutinin (LCA); Mannose-binding lectin (MBL); BanLec; galectins; Phaseolus vulgaris Leucoagglutinin (PHA-L); Phaseolus vulgaris Erythroagglutinin (PHA-E); or Datura stramonium Lectin (DSL); Membrane Attack Complex/Perforin (MACPF) proteins: e.g., MACPF isolated from fern; or GNIP1Aa isolated form chromobacteria; Plant virus coat protein-toxin fusions: e.g., Pea enation mosaic virus (PEMV) fusions; or POC anti-aphids; Glycan binding domain/toxin fusion proteins: e.g., chitinase glycan binding domain from Yersinia entomophaga MH96, glycan binding domain from snowdrop lectin, glycan binding domain from plant Luteovirus, and/or glycan binding domain from insect Parvoviridae or Baculoviridae viruses.

[0668] In yet other embodiments, an Insecticidal Agent (IA) can be selected from the following group: Acetylcholinesterase (AchE) inhibitors: e.g., carbamates (e.g., alanycarb, aldicarb, bendiocarb, benfuracarb, butocarboxim, butoxycarboxim, carbaryl, carbofuran, carbosulfan, ethiofencarb, fenobucarb, formetanate, furathiocarb, isoprocarb, methiocarb, methomyl, metolcarb, oxamyl, pirimicarb, propoxur, thiodicarb, thiofanox, triazamate, trimethacarb, xmc, and xylylcarb); and organophosphates (e.g., acephate, azamethiphos, azinphos-ethyl, azinphos-methyl, cadusafos, chlorethoxyfos, chlorfenvinphos, chlormephos, chlorpyrifos, chlorpyrifos-methyl, coumaphos, cyanophos, demeton-s-methyl, diazinon, dichlorvos/ddvp, dicrotophos, dimethoate, dimethylvinphos, disulfoton, epn, ethion, ethoprophos, famphur, fenamiphos, fenitrothion, fenthion, fosthiazate, heptenophos, isofenphos, isoxathion, malathion, mecarbam, methamidophos, methidathion, mevinphos, monocrotophos, naled, omethoate, oxydemeton-methyl, parathion, parathion-methyl, phenthoate, phosalone, phorate, phosmet, phosphamidon, phoxim, profenofos, propetamphos, prothiofos, pyraclofos, pyridaphenthion, quinalphos, sulfotep, tebupirimfos, temephos, terbufos, tetrachlorvinphos, thiometon, triazophos, trichlorfon, vamidothion, pirimiphos-methyl, imicyafos, and isopropyl o-(methoxyaminothio-phosphoryl) salicylate); GABA-gated chloride channel blockers: e.g., cyclodiene organochlorines (e.g., chlordane and endosulfan); and phenylpyrazoles (fiproles) (e.g., ethiprole and fipronil); Sodium channel modulators: e.g., pyrethroids and pyrethrins (e.g., acrinathrin, allethrin, d-cis-trans allethrin, d-trans allethrin, bifenthrin, bioallethrin, bioallethrin s-cyclopentenyl, bioresmethrin, cycloprothrin, cyfluthrin, beta-cyfluthrin, cyhalothrin, lambda-cyhalothrin, gamma-cyhalothrin, cypermethrin, alpha-cypermethrin, beta-cypermethrin, theta-cypermethrin, zeta-cypermethrin, cyphenothrin [(1r)-trans-isomers], deltamethrin, empenthrin [(ez)-(1r)-isomers], esfenvalerate, etofenprox, fenpropathrin, fenvalerate, flucythrinate, flumethrin, tau-fluvalinate, kadathrin, pyrethrins (pyrethrum), halfenprox, phenothrin [(1r)-trans-isomer], prallethrin, resmethrin, silafluofen, tefluthrin, tetramethrin, tetramethrin [(1r)-isomers], tralomethrin, transfluthrin, and permethrin); DDT; or methoxychlor; Nicotinic acetylcholine receptor (nAchR) Competitive Modulators: e.g., neonicotinoids (e.g., acetamiprid, clothianidin, dinotefuran, imidacloprid, nitenpyram, thiacloprid, thiamethoxam); nicotine; sulfoximines (e.g., sulfoxaflor); butenolides (e.g., flupyradifurone); and mesoionics (e.g., triflumezopyrim); Nicotinic acetylcholine receptor (nAchR) allosteric modulators—site I: e.g., spinosyns (e.g., spinetoram and spinosad); Glutamate-gated chloride channel (GluCl) allosteric modulators: e.g., avermectins and milbemycins (e.g., abamectin, emamectin benzoate, lepimectin, and milbemectin); Juvenile hormone mimics: e.g., juvenile hormone analogues (e.g., hydroprene, kinoprene, and methoprene); fenoxycarb; and pyriproxyfen; Miscellaneous non-specific (multi-site) inhibitors: e.g., alkyl halides (e.g., methyl bromide and other alkyl halides); chloropicrin; tartar emetic; and methyl isothiocyanate generators (e.g., dazomet and metam); Chordotonal organ TRPV channel modulators: e.g., pyridine azomethine derivatives (e.g., pymetrozine and pyrifluquinazon); and pyropenes (e.g., afidopyropen); Mite growth inhibitors: e.g., clofentezine; diflovidazin; hexythiazox; and etoxazole; Inhibitors of mitochondrial ATP synthase: e.g., diafenthiuron; organotin miticides (e.g., azocyclotin, cyhexatin, and fenbutatin oxide); propargite; and tetradifon; Uncouplers of oxidative phosphorylation via disruption of the proton gradient: e.g., pyrroles, dinitrophenols, and sulfluramid (e.g., chlorfenapyr, DNOC, and sulfluramid); Nicotinic acetylcholine receptor (nAchR) channel blockers: e.g., nereistoxin analogues such as bensultap, cartap hydrochloride, thiocyclam, thiosultap-sodium; Moulting disruptors (dipteran): e.g., cyromazine; Ecdysone receptor agonists: e.g., diacylhydrazines such as chromafenozide, halofenozide, methoxyfenozide, and tebufenozide; Octopamine receptor agonists: e.g., amitraz; Mitochondrial complex III electron transport inhibitors: e.g., hydramethylnon; acequinocyl; fluacrypyrim; and bifenazate; Mitochondrial complex I electron transport inhibitors: e.g., meti acaricides and insecticides (e.g., fenazaquin, fenpyroximate, pyrimidifen, pyridaben, tebufenpyrad, and tolfenpyrad); and rotenone; Voltage-dependent sodium channel blockers: e.g., oxadiazines (e.g., indoxacarb); and semicarbazones (e.g., metaflumizone); Inhibitors of acetyl co-enzyme A carboxylase: e.g., tetronic and tetramic acid derivatives (e.g., spirodiclofen, spiromesifen, spiropidion, and spirotetramat); Mitochondrial complex IV electron transport inhibitors: e.g., phosphides (e.g., aluminum phosphide, calcium phosphide, phosphine, and zinc phosphide); and cyanides (e.g., calcium cyanide, potassium cyanide, and sodium cyanide); Mitochondrial complex II electron transport inhibitors: e.g., beta-ketonitrile derivatives (e.g., cyenopyrafen and cyflumetofen); and carboxanilides (e.g., pyflubumide); Ryanodine receptor modulators: e.g., diamides such as chlorantraniliprole, cyantraniliprole, cyclaniliprole, flubendiamide, and tetraniliprole; Chordotonal organ modulators—undefined target site: e.g., flonicamid; or GABA-gated chloride channel allosteric modulators: e.g., meta-diamides and isoxazolines, such as broflanilide, fluxametamide.

[0669] In some embodiments, an IA can be a nucleotide, polynucleotide, gene, peptide, polypeptide, protein, or enzyme.

[0670] In some embodiments, an IA can be expressed in plants. For example, in some embodiments, an IA operable to be expressed in a plant, plant tissue, plant cell, plant seed, or plant part thereof, can include one or more of the following: nucleotides, peptides, polypeptides, and/or proteins isolated from the organisms known as Bacillus thuringiensis var. israelensis, Bacillus thuringiensis var. aizawai, Bacillus thuringiensis var. kurstaki, Bacillus thuringiensis var. tenebrionensis, and/or Bacillus sphaericus; chitinases; Galanthus nivalis agglutinin; WupA dsRNA; TIC4670 Beta pore forming protein; AfIP-1A/1B, PIP-72Aa, luteovirus CP-toxin fusion; chitinase glycan binding domain from Yersinia entomophaga MH96; glycan binding domain from snowdrop lectin fused to a toxin; glycan binding domain from plant Luteovirus fused to toxin; and glycan binding domain from insect Parvoviridae or Baculoviridae coat protein viruses fused to toxin.

[0671] IAs: Fungi and Fungal Toxins

[0672] Entomopathogenic fungi are fungi that can an act as a parasite and/or disease of insect and/or invertebrates. As their name implies, entomopathogenic fungi are eukaryote organisms, having a nucleus clearly defined by a membrane. Entomopathogenic fungi can be a single-cell organism (i.e., unicellular), such as in yeasts; alternatively, they can be formed multicellularly via filamentous units known as hyphae, forming mycelium. Hyphae are formed by single-nucleate or multi-nucleate segments, separated by transverse walls.

[0673] Fungi reproduction units are known as spores or conidia. As it pertains to entomopathogenic fungi, target insects are usually infected by these reproductive units. Generally, the infection of insects by entomopathogenic fungi is usually divided into three steps: (1) adhesion and spore germination in the insect's cuticle; (2) penetration within the insect's hemocele; and (3) fungi development, generally ending with the insect's death. See Tanada, Y., & Kaya, H. K. (1993), Insect Pathology. San Diego. Academic Press.

[0674] Briefly, a general route of pathogenesis is described as follows: once the entomopathogenic fungus has penetrated the cuticle, it goes on to the hemocele, wherein the hyphae convert into hyphael bodies or blastospores and/or protoplasts. These then disseminate to all parts of the insect body, and ultimately destroy the internal organs. The insect's death occurs due to nutritional deficiencies, invasion and destruction of insect tissue and metabolic imbalances due to toxic substances which are produced by the fungus. See Gillespie, A. T. and Claydon, N. The use of entomogenous fungi for pest control and the role of toxins in pathogenesis. (1989), Pestic. Sci., 27: 203-215.

[0675] Within the insect's cavity, infection success will depend on the genetic potential the fungus has to grow rapidly, penetrate barriers found inside the insect and resist toxic substances the insect might produce, as well as its defense mechanisms. The insect's primary defense mechanism is the encapsulation and melanization of foreign bodies.

[0676] Once the insect's immune barriers are overcome, fungi grows saprophytically, forms a mycelium mass and produces reproductive structures within the hemocele. The spores and sterile hyphae emerge from the insect under adequate humidity and temperature conditions. The spore production, unloading, dispersion, survival and germination processes will depend on environmental conditions. The vast number of spores produced by the insect cadavers partially compensates the high odds of the great majority of them not surviving at all. See A. E. Hajek & R. J St. Leger, Interactions Between Fungal Pathogens and Insect Hosts, Annual Review of Entomology 1994 39:1, 293-322

[0677] In some embodiments, an IA can be an entomopathogenic fungi, or product derived therefrom, for example, hyphae, spores or reproductive structures.

[0678] In some embodiments, an IA can be a peptide, protein, or toxin produced from an entomopathogenic fungi.

[0679] In some embodiments, an IA can be an Ascomycete fungal toxin.

[0680] In some embodiments, an IA can be a Cordycipitaceae family fungal toxin.

[0681] In some embodiments, an IA can be is a Akanthomyces toxin; a Ascopolyporus toxin; a Beauveria toxin; a Beejasamuha toxin; a Cordyceps toxin; a Coremiopsis toxin; a Engyodontium toxin; a Gibellula toxin; a Hyperdermium toxin; a Insecticola toxin; a Isaria toxin; a Lecanicillium toxin; a Microhilum toxin; a Phytocordyceps toxin; a Pseudogibellula toxin; a Rotiferophthora toxin; a Simplicillium toxin; or a Torrubiella toxin.

[0682] In some embodiments, an IA can be an organism or toxin therefrom, selected from the following genera: Beauveria; Metarhizium; Paecilomyces; Lecanicillium; Nomuraea; Isaria; Hirsutella; Sorosporella; Aspergillus; Cordiceps; Entomophthora; Zoophthora; Pandora; Entomophaga; Conidiobolus and Basidiobolus.

[0683] In some embodiments, an IA can be a Beauveria toxin.

[0684] In some embodiments, an IA can be: a Beauveria alba toxin; a Beauveria amorpha toxin; a Beauveria arenaria toxin; a Beauveria asiatica toxin; a Beauveria australis toxin; a Beauveria bassiana toxin; a Cordyceps bassiana toxin; a Beauveria brongniartii toxin; a Beauveria brumptii toxin; a Beauveria caledonica toxin; a Beauveria chiromensis toxin; a Beauveria coccorum toxin; a Beauveria cretacea toxin; a Beauveria cylindrospora toxin; a Beauveria delacroixii toxin; a Beauveria densa toxin; a Beauveria dependens toxin; a Beauveria doryphorae toxin; a Beauveria effusa toxin; a Beauveria epigaea toxin; a Beauveria felina toxin; a Beauveria geodes toxin; a Beauveria globulifera toxin; a Beauveria heimii toxin; a Beauveria hoplocheli toxin; a Beauveria kipukae toxin; a Beauveria laxa toxin; a Beauveria malawiensis toxin; a Beauveria medogensis toxin; a Beauveria melolonthae toxin; a Beauveria nubicola toxin; a Beauveria oryzae toxin; a Beauveria paradoxa toxin; a Beauveria paranensis toxin; a Beauveria parasitica toxin; a Beauveria petelotii toxin; a Beauveria pseudobassiana toxin; a Beauveria rileyi toxin; a Beauveria rubra toxin; a Beauveria shiotae toxin; a Beauveria sobolifera toxin; a Beauveria spicata toxin; a Beauveria stephanoderis toxin; a Beauveria sulfurescens toxin; a Beauveria sungii toxin; a Beauveria tenella toxin; a Beauveria tundrensis toxin; a Beauveria velata toxin; a Beauveria varroae toxin; a Beauveria vermiconia toxin; a Beauveria vexans toxin; a Beauveria viannai toxin; or a Beauveria virella toxin.

[0685] In some embodiments, an IA can be a Beauveria bassiana toxin

[0686] In some embodiments, an IA can be beauvericin.

[0687] Beauvericin is a fungal toxin produced by various Fusarium species, as well as the fungus Beauveria bassiana. Beauvericin is a cyclic peptide, with toxic effects on insects as well as both human and murine cell lines. The activity of beauvericin is due to the ionophoric properties of the compound. Beauvericin is capable of forming complexes with alkali metal cations and affects ion transport across cell membranes. In addition, beauvericin has been reported to be one of the most powerful inhibitors of cholesterol acetyltransferase. Beauvericin has also been shown to induce a type of cell death very similar to apoptosis. Circumstantial evidence further indicates that beauvericin acts in concert with other Fusarium toxins to cause additional toxic effects.

[0688] In some embodiments, an IA can be a beauvericin having the chemical formula C₄₅H₅₇N₃O₉.

[0689] In some embodiments, an IA can be a “Beauvericin A” toxin having the chemical formula C₄₆H₅₉N₃O₉.

[0690] In some embodiments, an IA can be a “Beauvericin B” toxin having the chemical formula C₄₇H₆₁N₃O₉.

[0691] In some embodiments, an IA can be a Beauveria bassiana strain ANT-03 spore.

[0692] Exemplary methods of producing, making, and using fungi and fungal toxins for the control and/or inhibition of insects are disclosed in: U.S. Pat. No. 9,217,140, entitled “Fungal strain Beauveria sp. MTCC 5184 and a process for the preparation of enzymes therefrom”; U.S. Pat. No. 6,261,553, entitled “Mycoinsecticides against an insect of the grasshopper family”; U.S. Pat. No. 8,709,399, entitled “Bio-pesticide and method for pest control”; U.S. Pat. No. 7,241,612, entitled “Methods and materials for control of insects such as pecan weevils”; and U.S. Pat. No. 8,226,938, entitled “Biocontrol of Varroa mites with Beauveria bassiana,” the disclosures of which are incorporated here by reference in their entireties.

[0693] IAs: Lectins

[0694] Lectins are polypeptides that are able to recognize and reversibly bind in a specific way to free carbohydrates and/or the glycoconjugates of cell membranes. Lectins are one of the two groups of glycan-binding proteins (GBPs), the other being sulfated glycosaminoglycan (GAG)-binding proteins. Found in the animalia, plantae, fungi, protista, archaea, bacteria and virus kingdoms, lectins have highly variable biological functions depending on the organism of origin. For example, in mammals, endogenous lectins are involved in cell-extracellular matrix (ECM); gamete fertilization; cell-cell self-recognition; embryonic development; cell growth, differentiation, signaling, adhesion, and migration; apoptosis; host-pathogen interactions; immunomodulation and inflammation; glycoprotein folding and routing; mitogenic induction; and homeostasis.

[0695] Typically, lectins possess at least one non-catalytic domain with the ability to bind—in a reversible way with high specificity—to carbohydrates that are bound to cell membranes or free carbohydrates (e.g., polysaccharides, glycoproteins, or glycolipids). This domain is known as the carbohydrate-recognition domain (CRD). In some embodiments, examples of lectins can include: Concanavalin A (ConA), which is isolated from jack beans. ConA binds to glucose, mannose, and glycosides of mannose and/or glucose. Wheat germ agglutinin (WGA) is another lectin that binds to N-acetylglucosamine and its glycosides. Red kidney bean lectin binds to N-acetylglucosamine, and Peanut agglutinin binds to galactose and galactosides. An exemplary review of lectin structure and biology can be found in Essentials of Glycobiology, 3rd edition. Varki A, Cummings R D, Esko J D, et al., editors. Cold Spring Harbor (NY): Cold Spring Harbor Laboratory Press; 2015-2017.

[0696] Due to their diverse roles and structures, lectins can be categorized according to several criteria, e.g., lectins can be categorized based on cell localization (e.g., extracellular lectins, intracellular endoplasmic reticulum (ER) lectins, Golgi lectins, cytoplasmic lectins, membrane-bound lectins). See Lakhtin et al., Lectins of living organisms. The overview. Anaerobe. 2011 December; 17(6):452-5, the disclosure of which is incorporated herein by reference in its entirety.

[0697] Similarities in structure or sequence can also be used to categorize lectins (e.g., beta prism lectins (B-type), calcium dependent lectins (C-type), lectins with Ficolins-Fibrinogen/collagen domain (F-type), garlic and snow drop lectins (G-type), hyaluronan bonding proteins or hyal-adherins (H-type), immunoglobulin superfamily lectins (I-type), jocob and related lectins (J-type), legume seed lectins (L-type), alpha mannosidase related lectins (M-type), nucleotide phosphohydrolases lectins (N-type), ricin lectins (R-type), Tachypleus tridentatus (T-type), wheat germ agglutinin (W type), Xenopus egg lectins (X type)). See Kumar et al., Biological role of lectins: A review. J. Orofac. Sci. 2012; 4:20-25, the disclosure of which is incorporated herein by reference in its entirety.

[0698] Alternatively, carbohydrate specificities can also be used to categorize lectins. For example, based on animals and plants (e.g., d-mannose (d-glucose)-binding lectins, 2-acetamido-2-deoxy-glucose-binding lectins, 2-acetamido-2-deoxy-galactose-binding lectins, d-galactose-binding lectins, l-fucose-binding lectins, other lectins); or based on all organisms (e.g., Glucose/mannose-binding lectins, galactose and N-acetyl-d-galactosamine-binding lectins, l-fucose-binding lectins, sialic acids-binding lectins). See Goldstein I. J., & Hayes C. E. The Lectins: Carbohydrate-binding proteins of plants and animals. Adv. Carbohydr. Chem. Biochem. 1978; 35:127-340; and Kumar et al., Biological role of lectins: A review. J. Orofac. Sci. 2012; 4:20-25, the disclosures of which are incorporated herein by reference in their entirety.

[0699] Characterizing a lectin's binding domain can be accomplished via X-ray co-crystallography, NMR, and MS mapping of relevant contacts and protein dynamics; equilibrium dialysis against labeled hapten; equilibrium binding with filtration (e.g., membranes); equilibrium binding, stopped by PEG with centrifugation (solubilized receptor); the use of multivalent ligands; the use of multivalent receptor probes; Biacore realtime kinetics; and/or evaluating the rates of cell adhesion, e.g., flow under shear to immobilized glycan or receptor.

[0700] Lectin sequences, 3D X-ray structures, and references concerning lectins, can be obtained from the website: https://www.unilectin.eu/unilectin3D/; See Bonnardel et al., UniLectin3D, a database of carbohydrate binding proteins with curated information on 3D structures and interacting ligands. Nucleic Acids Res. 2019 Jan. 8; 47(D1):D1236-D1244, the disclosure of which is incorporated herein by reference in its entirety.

[0701] In some embodiments, an IA can be a lectin.

[0702] In some embodiments, an IA can be a lectin, wherein said lectin is not fused nor operably linked to the CRIP.

[0703] In some embodiments, an IA can be one of the following: Galanthus nivalis agglutinin (GNA); Sambucus nigra lectin (SNA); Maackia amurensis-II (MAL-II); Erythrina cristagalli lectin (ECL); Ricinus communis agglutinin-I (RCA); peanut agglutinin (PNA); wheat germ agglutinin (WGA); Griffonia simplicifolia-II (GSL-II); Con A; Lens culinaris agglutinin (LCA); Mannose-binding lectin (MBL); BanLec; galectins; Phaseolus vulgaris Leucoagglutinin (PHA-L); Phaseolus vulgaris Erythroagglutinin (PHA-E); and/or Datura stramonium Lectin (DSL).

[0704] In some embodiments, an IA can be one or more of the lectins listed in Table 3. For example, in some embodiments, the lectins can have an amino acid sequence that is at least 50% identical, at least 55% identical, at least 60% identical, at least 65% identical, at least 70% identical, at least 75% identical, at least 80% identical, at least 81% identical, at least 82% identical, at least 83% identical, at least 84% identical, at least 85% identical, at least 86% identical, at least 87% identical, at least 88% identical, at least 89% identical, at least 90% identical, at least 91% identical, at least 92% identical, at least 93% identical, at least 94% identical, at least 95% identical, at least 96% identical, at least 97% identical, at least 98% identical, at least 99% identical, at least 99.5% identical, at least 99.6% identical, at least 99.7% identical, at least 99.8% identical, at least 99.9% identical, or 100% identical to an amino acid sequence set forth in any one of SEQ ID NOs: 35, 595-615, or a variant thereof.

TABLE 3
This table provides non-limiting examples of well characterized
lectins, and their accession numbers on NCBI, sequences, and SEQ ID NO as listed in
the sequence listing.

| | Accession | | SEQ ID |
|---|---|---|---|
| Name | No. | Sequence | NO. |
| Galanthus nivalis | AAL07474 | MAKASLLILATIFLGVITPSCLSENILYSGETLPT | 35 |
| agglutinin (GNA) | | GGFLSSGSFVFIMQEDCNLVLYNVDKPIWATNTGG | |
| | | LSSDCSLSMQNDGNLVVFTPSNKPIWASNTDGQNG | |
| | | NYVCILQKDRNVVIYGTNRWATGTYTGAVGIPESP | |
| | | PSEKYPSAGKIKLVTAK | |
| Galanthus nivalis | P30617 | MAKASLLILAAIFLGVITPSCLSDNILYSGETLST | 595 |
| agglutinin (GNA) | | GEFLNYGSFVFIMQEDCNLVLYDVDKPIWATNTGG | |
| | | LSRSCFLSMQTDGNLVVYNPSNKPIWASNTGGQNG | |
| | | NYVCILQKDRNVVIYGTDRWATGTHTGLVGIPASP | |
| | | PSEKYPTAGKIKLVTAK | |
| Sambucus nigra | AAL04120 | MRVIAAAMLYLYIVVLAICSVGIEGIEYPSVSENL | 596 |
| (European elder) | | AGAKSATWDFLRMPTSRNGYDDGEPITGNIVGRDG | |
| lectin (SNA) | | LCVDVRNGYDTDGTPIQLWPCGTQRNQQWTFHTDD | |
| | | TIRSMGKCMTANGLNNGGNIMIFNCSTAVENAIKW | |
| | | EVTIDGSIINPSSGLVITAPSAASRTILLLQNNIY | |
| | | AASQGWTVSNNVQPIVASIVGFREMCLQANGENNG | |
| | | VWMEDCEATSLQQQWALFGDRTIRVNSNRGLCVTT | |
| | | NGYNSRDLIIILKCQGLPSQRWFFNSDGAIVNPKS | |
| | | KLVMDVKSSNVSLREIIIYPATGRPNQQWVTQVLP | |
| | | S | |
| Leukoagglutinating | P0DKL3 | MATSNSKPTQVLLATELTFFELLLNNVNSSDELSF | 597 |
| lectin from the seeds | | TINNFVPNEADLLFQGEASVSSTGVLQLTRVENGQ | |
| of Maackia | | PQKYSVGRALYAAPVRIWDNTTGSVASESTSFTFV | |
| amurensis (MAL) | | VKAPNPDITSDGLAFYLAPPDSQIPSGSVSKYLGL | |
| | | FNNSNSDSSNQIVAVELDTYFAHSYDPWDPNYRHI | |
| | | GIDVNGIESIKTVQWDWINGGVAFATITYLAPNKT | |
| | | LIASLVYPSNQTTESVAASVDLKEILPEWVRVGES | |
| | | AATGYPTEVETHDVLSWSFTSTLEANCDAATENNV | |
| | | HIARYTA | |
| Erythrina cristagalli | P83410 | VETISFSFSEFEPGNDNLTLQGAALITQSGVLQLT | 598 |
| lectin (ECL) | | KINQNGMPAWDSTGRTLYTKPVHMWDSTTGTVASF | |
| | | ETRESESIEQPYTRPLPADGLVFFMGPTKSKPAQG | |
| | | YGYLGVENNSKQDNSYQTLAVEFDTFSNPWDPPQV | |
| | | PHIGIDVNSIRSIKTQPFQLDNGQVANVVIKYDAP | |
| | | SKILHVVLVYPSSGAIYTIAEIVDVKQVLPDWVDV | |
| | | GLSGATGAQRDAAETHDVYSWSFQASLPE | |
| Ricinus communis | AAB22584 | IFPKQYPIINFTTADATVESYTNFIRAVRSHLTTG | 599 |
| agglutinin-I (RCA) | | ADVRHEIPVLPNRVGLPISQRFILVELSNHAELSV | |
| | | TLALDVTNAYVVGCRAGNSAYFFHPDNQEDAEAIT | |
| | | HLFTDVQNSFTFAFGGNYDRLEQLGGLRENIELGT | |
| | | GPLEDAISALYYYSTCGTQIPTLARSEMVCIQMIS | |
| | | EAARFQYIEGEMRTRIRYNRRSAPDPSVITLENSW | |
| | | GRLSTAIQESNQGAFASPIQLQRRNGSKENVYDVS | |
| | | ILIPIIALMVYRCAPPPSSQFSLLIRPVVPNENAD | |
| | | VCMDPEPIVRIVGRNGLCVDVTGEEFFDGNPIQLW | |
| | | PCKSNTDWNQLWTLRKDSTIRSNGKCLTISKSSPR | |
| | | QQVVIYNCSTATVGATRWQIWDNRTIINPRSGLVL | |
| | | AATSGNSGTKLTVQTNIYAVSQGWLPTNNTQPFVT | |
| | | TIVGLYGMCLQANSGKVWLEDCTSEKAEQQWALYA | |
| | | DGSIRPQQNRDNCLTTDANIKGTVVKILSCGPASS | |
| | | GQRWMFKNDGTILNLYNGLVLDVRRSDPSLKQIIV | |
| | | HPFHGNLNQIWLPLF | |
| Peanut agglutinin | P02872 | MKPFCVFLTFFLLLAASSKKVDSAETVSENENSES | 600 |
| (PNA) | | EGNPAINFQGDVTVLSNGNIQLTNLNKVNSVGRVL | |
| | | YAMPVRIWSSATGNVASFLTSFSFEMKDIKDYDPA | |
| | | DGIIFFIAPEDTQIPAGSIGGGTLGVSDTKGAGHE | |
| | | VGVEFDTYSNSEYNDPPTDHVGIDVNSVDSVKTVP | |
| | | WNSVSGAVVKVTVIYDSSTKTLSVAVINDNGDITT | |
| | | IAQVVDLKAKLPERVKFGFSASGSLGGRQIHLIRS | |
| | | WSFTSTLITTTRRSIDNNEKKIMNMASA | |
| Agglutinin isolectin | P10968 | MKMMSTRALALGAAAVLAFAAATAQAQRCGEQGSN | 601 |
| 1 (WGA1) | | MECPNNLCCSQYGYCGMGGDYCGKGCQNGACWTSK | |
| | | RCGSQAGGATCTNNQCCSQYGYCGFGAEYCGAGCQ | |
| | | GGPCRADIKCGSQAGGKLCPNNLCCSQWGFCGLGS | |
| | | EFCGGGCQSGACSTDKPCGKDAGGRVCTNNYCCSK | |
| | | WGSCGIGPGYCGAGCQSGGCDGVFAEAITANSTLL | |
| | | QE | |
| Concanavalin-A | P02866 | MAISKKSSLFLPIFTFITMFLMVVNKVSSSTHETN | 602 |
| (CNA) precursor | | ALHEMENQFSKDQKDLILQGDATTGTDGNLELTRV | |
| | | SSNGSPQGSSVGRALFYAPVHIWESSAVVASFEAT | |
| | | FTFLIKSPDSHPADGIAFFISNIDSSIPSGSTGRL | |
| | | LGLFPDANVIRNSTTIDENAAYNADTIVAVELDTY | |
| | | PNTDIGDPSYPHIGIDIKSVRSKKTAKWNMQNGKV | |
| | | GTAHIIYNSVDKRLSAVVSYPNADSATVSYDVDLD | |
| | | NVLPEWVRVGLSASTGLYKETNTILSWSFTSKLKS | |
| | | NEIPDIATVV | |
| Jacalin-like lectin | 6FLY_A | SGLVKLGLWGGNEGTLQDIDGHPTRLTKIVIRSAH | 603 |
| (Chain A) | | AIDALQFDYVEDGKTFAAGQWGGNGGKSDTIEFQP | |
| | | GEYLIAIKGTTGALGAVTNLVRSLTFISNMRTYGP | |
| | | FGLEHGTPFSVPVASGRIVAFYGRFGSLVDAFGIY | |
| | | LMPY | |
| Lectin alpha-1 chain | P07443 | VTSYTLNEVVPLKDVVPEWVRIGFSATTGAEFAAH | 604 |
| | | EVLSWSFHSELGGTSASKQ | |
| Lectin CaBo | P58906 | MAISKKSSLYLPIFTFITMLLMVVNKVSSSTADAN | 605 |
| | | ALHFTFNQFSKDQKDLILQGDATTGTDGNLELTRV | |
| | | SSNGSPQGNSVGRALFYAPVHIWESSAVVASEDAT | |
| | | FKFLIKSPDSEPADGITFFIANIDSSIPSGSGGRL | |
| | | LGLFPDANIIKNSTTIDENAAYNADTIVAVELDTY | |
| | | PNTDIGDPNYPHIGIDIKSIRSKKTTRWNIQNGKV | |
| | | GTAHINYNSVGKRLSAIVSYPNSDSATVSYDVDLD | |
| | | NVLPEWVRVGLSATTGLYKETNTILSWSFTSKLKS | |
| | | N | |
| Lectin ConGF | A0A067XG71 | ADTIVAVELDTYPNTDIGDPNYPHIGIDIKSIRSK | 606 |
| | | KIAKWNMQDGKVATAHIIYNSVGKRLSAVVSYPNA | |
| | | DSATVSYDVDLDNVLPEWVRVGLSATTGLYKETNT | |
| | | ILSWSFTSKLKSNSTAETNALHETENQFTKDQKDL | |
| | | ILQGDATTDSDGNLQLTRVSSDGTPQGNSVGRALF | |
| | | YAPVHIWESSAVVASEDATFTFLIKSPDSDPADGI | |
| | | TFFISNMDSTIPSGSGGRLLGLFPDAN | |
| Mannose-specific | P86184 | ADTIVAVELDSYPNTDIGDPSYPHIGIDIKSIRSK | 607 |
| lectin alpha chain | | STARWNMQTGKVGTAHISYNSVAKRLTAVVSYSGS | |
| | | SSTTVSYDVDLNNVLPEWVRVGLSATTGLYKETNT | |
| | | ILSWSFTSKLKTNSIADANALHESFHQFTQNPKDL | |
| | | ILQGDATTDSDGNLELTKVSSSGSPQGSSVGRALF | |
| | | YAPVHIWESSAVVASFDATFTFLIKSPDSEPADGI | |
| | | TFFIANTDTSIPSGSSGRLLGLFPDAN | |
| Beta-galactoside- | P81446 | MNGHLASRRAWVWYFLMLGQVFGATVKAETKFSYE | 608 |
| specific lectin 1 | | RLRLRVTHQTTGEEYFRFITLLRDYVSSGSESNEI | |
| | | PLLRQSTIPVSDAQRFVLVELTNEGGDSITAAIDV | |
| | | TNLYVVAYQAGDQSYFLRDAPRGAETHLFTGTTRS | |
| | | SLPENGSYPDLERYAGHRDQIPLGIDQLIQSVTAL | |
| | | RFPGGSTRTQARSILILIQMISEAARENPILWRAR | |
| | | QYINSGASFLPDVYMLELETSWGQQSTQVQQSTDG | |
| | | VENNPIRLAIPPGNFVTLTNVRDVIASLAIMLFVC | |
| | | GERPSSSDVRYWPLVIRPVIADDVTCSASEPTVRI | |
| | | VGRNGMCVDVRDDDFHDGNQIQLWPSKSNNDPNQL | |
| | | WTIKRDGTIRSNGSCLTTYGYTAGVYVMIEDCNTA | |
| | | VREATLWEIWGNGTIINPRSNLVLAASSGIKGTTL | |
| | | TVQTLDYTLGQGWLAGNDTAPREVTIYGERDLCME | |
| | | SNGGSVWVETCVISQQNQRWALYGDGSIRPKQNQD | |
| | | QCLTCGRDSVSTVINIVSCSAGSSGQRWVETNEGA | |
| | | ILNLKNGLAMDVAQANPKLRRIIIYPATGKPNQMW | |
| | | LPVP | |
| Galectin-3 | P17931 | MADNESLHDALSGSGNPNPQGWPGAWGNQPAGAGG | 609 |
| | | YPGASYPGAYPGQAPPGAYPGQAPPGAYPGAPGAY | |
| | | PGAPAPGVYPGPPSGPGAYPSSGQPSATGAYPATG | |
| | | PYGAPAGPLIVPYNLPLPGGVVPRMLITILGTVKP | |
| | | NANRIALDFQRGNDVAFHENPRENENNRRVIVCNT | |
| | | KLDNNWGREERQSVFPFESGKPFKIQVLVEPDHEK | |
| | | VAVNDAHLLQYNHRVKKLNEISKLGISGDIDLTSA | |
| | | SYTMI | |
| Mannose/glucose- | P83721 | ADTIVAVELDTYPNTDIGDPSYQHIGINIKSIRSK | 610 |
| specific lectin | | ATTRWDVQNGKVGTAHISYNSVAKRLSAVVSYPGG | |
| Cramoll | | SSATVSYDVDLNNILPEWVRVGLSASTGLYKETNT | |
| | | ILSWSFTSKSNSTADAQSLHFTFNQFSQSPKDLIL | |
| | | QGDASTDSDGNLQLTRVSNGSPQSDSVGRALYYAP | |
| | | VHIWDKSAVVASFDATFTFLIKSPDREIADGIAFF | |
| | | IANTDSSIPHGSGGRLLGLFPDAN | |
| Beta-galactoside- | P82683 | MNAVMDSRGAWVSCFLILGLVFGATVKAETKESYE | 611 |
| specific lectin 3 | | RLRLRVTHQTTGDEYFRFITLLRDYVSSGSESNEI | |
| | | PLLRQSTIPVSDAQRFVLVELTNQGGDSITAAIDV | |
| | | TNLYVVAYQAGDQSYFLRDAPDGAERHLFTGTTRS | |
| | | SLPFTGSYTDLERYAGHRDQIPLGIEELIQSVSAL | |
| | | RYPGGSTRAQARSIIILIQMISEAARENPIFWRVR | |
| | | QDINSGESFLPDMYMLELETSWGQQSTQVQQSTDG | |
| | | VENNPERLAISTGNFVTLSNVRDVIASLAIMLFVC | |
| | | RDRPSSSEVRYWPLVIRPVLENSGAVDDVTCTASE | |
| | | PTVRIVGRDGLCVDVRDGKFHNGNPIQLSPCKSNT | |
| | | DPNQLWTIRRDGTIRSNGRCLTTYGYTAGVYVMIE | |
| | | DCNTAVREATLWQIWGNGTIINPRSNLVLGAASGS | |
| | | SGTTLTVQTQVYSLGQGWLAGNDTAPREVTIYGER | |
| | | DLCMEANGASVWVETCGSSTENQNWALYGDGSIRP | |
| | | KQNQDQCLTCQGDSVATVINIVSCSAGSSGQRWVF | |
| | | TNEGTILNLNNGLVMDVAQSNPSLRRIIIYPATGN | |
| | | PNQMWLPVP | |
| Lactose-binding | P86795 | SGAVHFSFTKFSTSSSDLTLQGSALVSSKGSLKKN | 612 |
| lectin-2 | | PSKKGKPVDHSVGRALYRSPIHIWDETTGKVASFD | |
| | | ATFSFVSEAPAIPMLFPSSKGELNDEDDTRIGGQL | |
| | | GVVNDSYNVIRVTVAVENDGYRNRVDPSARPHISL | |
| | | PIKSVRSKKTAKWNMQTGKVGTAHISYNSVAKRLS | |
| | | AVVSYTGNSSSTTVSYDVLLNLAVLPSKVLVGKTA | |
| | | TGLYKDHVETNTILSWSFTSKLKTNSIAD | |
| Galectin-1 | P09382 | MACGLVASNLNLKPGECLRVRGEVAPDAKSFVLNL | 613 |
| | | GKDSNNLCLHENPRENAHGDANTIVCNSKDGGAWG | |
| | | TEQREAVFPFQPGSVAEVCITEDQANLTVKLPDGY | |
| | | EFKFPNRLNLEAINYMAADGDFKIKCVAFD | |
| Alpha-N- | Q8WPD0 | MAFFRALCFVLLVGFAAACQPDCSWKCPPKCPPMW | 614 |
| acetylgalactosamine- | | TFYNGNCYRYFGTGKTYDEAESHCQEFTEVGLGHL | |
| specific lectin | | ASIASAEENNLLLTMWKSVRTTTTGGLWIGLNDQA | |
| | | EEGNFIWTDGSAVTFTDWATTQPDNYQNEDCAHMR | |
| | | HELDGDDRWNDIACSRAFAYVCKMSTTN | |
| Favin | P02871 | TDEITSESIPKFRPDQPNLIFQGGGYTTKEKLTLT | 615 |
| | | KAVKNTVGRALYSLPIHIWDSETGNVADFTTTFIF | |
| | | VIDAPNGYNVADGFTFFIAPVDTKPQTGGGYLGVE | |
| | | NGKDYDKTAQTVAVEFDTFYNAAWDPSNGKRHIGI | |
| | | DVNTIKSISTKSWNLQNGEEAHVAISFNATTNVLS | |
| | | VTLLYPNLTGYTLSEVVPLKDVVPEWVRIGESATT | |
| | | GAEYATHEVLSWTFLSELTGPSN | |

[0705] In some embodiments, an IA may comprise an amino acid sequence having at least 50%, at least 55%, at least 60%, at least 65%, at least 70%, at least 75%, at least 80%, at least 81%, at least 82%, at least 83%, at least 84%, at least 85%, at least 86%, at least 87%, at least 88%, at least 89%, at least 90%, at least 91%, at least 92%, at least 93%, at least 94%, at least 95%, at least 96%, at least 97%, at least 98%, at least 99%, at least 99.5%, at least 99.6%, at least 99.7%, at least 99.8%, at least 99.9%, or 100% amino acid sequence identity to an amino acid sequence as set forth in any one of SEQ ID NOs: 35, 595-615.

[0706] IAs: Chitinases

[0707] In some embodiments, an IA may be a chitinase.

[0708] In some embodiments, an IA may be a chitinase from Trichoderma viride.

[0709] In some embodiments, an IA may be a chitinase having an amino acid sequence as set forth in SEQ ID NO: 620.

[0710] In some embodiments, an IA may be a chitinase comprising an amino acid sequence having at least 50%, at least 55%, at least 60%, at least 65%, at least 70%, at least 75%, at least 80%, at least 81%, at least 82%, at least 83%, at least 84%, at least 85%, at least 86%, at least 87%, at least 88%, at least 89%, at least 90%, at least 91%, at least 92%, at least 93%, at least 94%, at least 95%, at least 96%, at least 97%, at least 98%, at least 99%, at least 99.5%, at least 99.6%, at least 99.7%, at least 99.8%, at least 99.9%, or 100% amino acid sequence identity to an amino acid sequence as set forth in any one of SEQ ID NO: 620.

[0711] IAs: Azadirachta indica Compounds

[0712] Azadirachta indica (also known as neem, nimtree or Indian lilac) is a tree in the mahogany family, Mehaceae. Native to the Indian subcontinent, Azadirachta indica typically grows in tropical and semi-tropical regions.

[0713] Azadirachta indica has been used for centuries as a source of pesticides. Various neem seed extracts, particularly the ones containing the hydrophilic, tetranortriterpenoid azadirachtin, are known to influence the feeding behavior, metamorphosis (insect growth regulating [IGR] effect), fecundity, and fitness of numerous insect species belonging to various orders.

[0714] Azadirachtin is a tetranortriterpenoid botanical insecticide of the liminoid class extracted from the neem tree (Azadirachta indica). It is a highly oxidized tetranortriterpenoid which boasts of a plethora of oxygen functionality and comprising an enol ether, acetal, hemiacetal, and tetra-substituted oxirane as well as a variety of carboxylic esters.

[0715] Azadirachtin is structurally similar to insect hormone “ecdysones”. These hormones typically control the process of metamorphosis when the insects pass from larva to pupa to adult. Azadirachtin mainly acts as an “ecdysone blocker”. It blocks the insect's production and release of vital hormones. As a result, insects cannot molt. Azadirachtin is also known to disturb mating and sexual communication of insects, repel larvae and adults, deter females from laying eggs, sterilize adults and deter feeding.

[0716] In some embodiments, an IA can be an Azadirachta indica compound.

[0717] In some embodiments, an IA can be an Azadirachtin; an Azadiradione; an Azadiradionolide; a Deacetylgedunin; a Deacetylazadirachtinol; a Desfuranoazadiradione; a Epoxyazadiradione; a Gedunin; a Mahmoodin; a Neemfruitin A; a Neemfruitin B; a Nimbolide; a Nimbin; a Nimolicinol; an Ohchinin Acetate; a Salannin; a Salannol; an alpha-Nimolactone; a beta-Nimolactone; a 2′,3′-Dihydrosalannin; a 3-Deacetylsalannin; a 6-Deacetylnimbin; a 7-Acetyl-16,17-dehydro-16-hydroxyneotrichilenone; a 7-Benzoylnimbocinol; a 7-Deacetyl-7-benzoylepoxyazadiradione; a 7-Deacetyl-7-benzoylgedunin; a 7-Deacetyl-17-epinimolicinol; a 15-Hydroxyazadiradione; a 17-Epi-17-Hydroxyazadiradione; a 17-Epiazadiradione; a 20,21,22,23-Tetrahydro-23-oxoazadirone; a 22,23-Dihydronimocinol; or a 28-Deoxonimbolide.

[0718] In some embodiments, an IA can be Azadirachtin.

[0719] In some embodiments, an IA can be an Azadirachtin having a chemical formula: C₃₅H₄₄O₁₆.

[0720] Exemplary methods of extracting Azadirachtin are disclosed in U.S. Pat. No. 6,312,738, entitled “Azadirachtin extraction process,” the disclosure of which is incorporated herein by reference in its entirety.

[0721] Exemplary methods of producing azadirachtin concentrates from neem seed materials are disclosed in PCT Application No. WO1995002962A1, entitled “Method for producing azadirachtin concentrates from neem seed materials,” the disclosure of which is incorporated herein by reference in its entirety.

[0722] Exemplary methods of purifying azadirachtin are disclosed in U.S. Pat. No. 5,736,145, entitled “Process for preparing purified Azadirachtin in powder form from neem seeds and storage stable aqueous composition containing Azadirachtin,” the disclosure of which is incorporated herein by reference in its entirety.

[0723] Exemplary methods of creating and storing compositions comprising azadirachtin are disclosed in U.S. Pat. No. 6,811,790, entitled “Storage stable pesticide formulations containing azadirachtin,” the disclosure of which is incorporated herein by reference in its entirety.

[0724] Exemplary methods of making and using Azadirachtin are disclosed in U.S. Pat. No. 9,635,858, entitled “Pesticide and a method of controlling a wide variety of pests,” the disclosure of which is incorporated herein by reference in its entirety.

[0725] Exemplary Azadirachtin extracts and compositions are disclosed in U.S. Pat. No. 4,943,434, entitled “Insecticidal hydrogenated neem extracts”; U.S. Pat. No. 5,411,736, entitled “Hydrophic extracted neem oil—a novel insecticide”; and U.S. Pat. No. 5,372,817, entitled “Insecticidal compositions derived from neem oil and neem wax fractions”; the disclosures of which are incorporated herein by reference in their entireties.

[0726] IAs: Boron Compounds

[0727] In some embodiments, an IA can be a boron compound.

[0728] In some embodiments, an IA may be boric acid, diboron tetrahydroxide, a borate, a boron oxide, a borane, or any combination of any of the foregoing.

[0729] In some embodiments, the IA may be a boranes and/or a borate ester that produces oxides of boron in aqueous media.

[0730] In some embodiments, the boron compound is boric acid, a borate (e.g., basic sodium borate (borax)), or a mixture of boric acid and a borate.

[0731] In some embodiments, an IA may be a borate. Suitable borates include, but are not limited to, perborates, metaborates, tetraborates, octaborates, borate esters, and any combination of any of the foregoing. Preferred borates include, but are not limited to, metallic borates (e.g., sodium borate, zinc borate and potassium borate), such as disodium tetraborate decahydrate, disodium octaborate tetrahydrate, sodium metaborate, sodium perborate monohydrate, disodium octaborate, sodium tetraborate pentahydrate, sodium tetraborate, copper metaborate, zinc borate, barium metaborate, and any combination thereof.

[0732] In some embodiments, an IA can be borax (e.g., sodium borate decahydrate-10 mol Na₂B₄O₇·10H₂O or sodium borate pentahydrate-5 mol Na₂B₄O₇·5H₂O),

[0733] In other embodiments, an IA can be a boron compound that may be utilized in effective amounts as substitutes for borax (or may be utilized in effective amounts in combination with borax or one another). For example, in some embodiments, an IA may be anhydrous borax (Na₂B₄O₇); ammonium tetraborate ((NH₄)₂B₄O₇·4H₂O); ammonium pentaborate ((NH₄)₂B₁₀O₁₆·8H₂O); potassium pentaborate (K2B₁₀O₁₆·8H₂O); potassium tetraborate (K2B₄O₇·4H₂O); sodium metaborate ((8 mol) Na₂B₂O₄·8H₂O); sodium metaborate ((4 mol) Na₂B₂O₄·4H₂O); disodium tetraborate decahydrate (Na₂B₄O₇·10H₂O); disodium tetraborate pentahydrate (Na₂B₄O₇·5H₂O); disodium octaborate tetrahydrate (Na₂B₈O₁₃·4H₂O); or combinations thereof.

[0734] In some embodiments, an IA can be a boron compound that is selected from the group consisting of: borax, boric acid, disodium octaborate, sodium borate, sodium metaborate, sodium tetraborate decahydrate, boron oxide, boron carbide, boron nitride, boron tribromide, boron trichloride, and boron trifluoride.

[0735] In some embodiments, an IA can be boric acid.

[0736] In some embodiments, an IA can be boric acid having a chemical formula of H₃BO₃.

[0737] Exemplary methods describing the production and use of boron compounds and/or boron-containing compounds are disclosed in U.S. Pat. No. 490,688, entitled “Insecticide”; U.S. Pat. No. 1,029,203, entitled “Insectifuge”; U.S. Pat. No. 1,636,688, entitled “Composition and method of preparing roach tablets”; U.S. Pat. No. 4,363,798, entitled “Termite bait composition”; U.S. Pat. No. 4,959,221, entitled “Pest exterminating composition”; U.S. Pat. No. 5,871,780, entitled “Pest-controlling composition”; and U.S. Pat. No. 8,778,372, entitled “Dual-action pest control formulation and method”; the disclosures of which are incorporated herein by reference in their entireties.

[0738] IAs: Viruses

[0739] In some embodiments, an IA can be a virus that possesses an insecticidal activity when in contact with an insect species.

[0740] In some embodiments, an IA can be a DNA virus or an RNA virus.

[0741] In some embodiments, an IA can be an ascovirus; baculovirus; densovirus; entomopoxvirus; hytrosavirus; iridovirus; nudivirus; polydnavirus; dicistrovirus; iflavirus; nodavirus; tetravirus; or cypovirus.

[0742] Ascoviridae Family Viruses

[0743] In some embodiments, an IA can be a virus from the Ascoviridae family. For example, in some embodiments, an IA can be an ascovirus such as Heliothis virescens ascovirus 3a; Heliothis virescens ascovirus 3; Heliothis virescens ascovirus 3b; Heliothis virescens ascovirus 3c; Heliothis virescens ascovirus 3d; Heliothis virescens ascovirus 3e; Heliothis virescens ascovirus 3f; Heliothis virescens ascovirus 3g; Heliothis virescens ascovirus 3h; Heliothis virescens ascovirus 3j; Spodoptera frugiperda ascovirus 1a; Trichoplusia ni ascovirus 2a; Heliothis virescens ascovirus 3i; Spodoptera ascovirus; Spodoptera exigua ascovirus 5a; Spodoptera frugiperda ascovirus 1c; Spodoptera frugiperda ascovirus 1d; Trichoplusia ni ascovirus 2b; Trichoplusia ni ascovirus 2c; Trichoplusia ni ascovirus 2d; or Trichoplusia ni ascovirus 6b.

[0744] In some embodiments, an IA can be a virus from the Ascoviridae family. For example, in some embodiments, an IA can be a toursvirus such as Diadromus pulchellus toursvirus; Diadromus pulchellus ascovirus 4a; or Dasineura jujubifolia toursvirus 2a.

[0745] Densovirinae Family Viruses

[0746] In some embodiments, an IA can be a virus from the Densovirinae family. For example, in some embodiments, an IA can be an Ambidensovirus.

[0747] In some embodiments, an IA can be an Ambidensovirus selected from the following group: Asteroid ambidensovirus 1; Sea star-associated densovirus; Blattodean ambidensovirus 1; Periplaneta fuliginosa densovirus; Periplaneta fuliginosa densovirus Guo/2000; Blattodean ambidensovirus 2; Blattella germanica densovirus 1; Decapod ambidensovirus 1; Cherax quadricarinatus densovirus; Dipteran ambidensovirus 1; Culex pipiens densovirus; Hemipteran ambidensovirus 1; Planococcus citri densovirus; Hemipteran ambidensovirus 2; Dysaphis plantaginea densovirus; Hemipteran ambidensovirus 3; Myzus persicae densovirus; Myzus persicae nicotianae densovirus; Hymenopteran ambidensovirus 1; Solenopsis invicta densovirus; Lepidopteran ambidensovirus 1; Galleria mellonella densovirus; Junonia coenia densovirus; Junonia coenia densovirus pBRJ/1990; Mythimna loreyi densovirus; Pseudoplusia includens densovirus; Orthopteran ambidensovirus 1; Acheta domestica densovirus; unclassified Ambidensovirus; Tetranychus urticae-associated ambidensovirus; unclassified Densovirus; Ambidensovirus CaaDV1; Ambidensovirus CaaDV2; Atrato Denso-like virus; Atrato Denso-like virus 1; Densovirus SC1065; Densovirus SC1118; Densovirus SC116; Densovirus SC2121; Densovirus SC2209; Densovirus SC2228; Densovirus SC2886; Densovirus SC3749; Densovirus SC3908; Densovirus SC4092; Densovirus SC444; Densovirus SC525; Diaphorina citri densovirus; Diatraea saccharalis densovirus; Lupine feces-associated densovirus; Lupine feces-associated densovirus 2; or Ambidensovirus sp.

[0748] Entomopoxvirinae Family Viruses

[0749] In some embodiments, an IA can be a virus from the Entomopoxvirinae family. For example, in some embodiments, an IA can be an Alphaentomopoxvirus; Betaentomopoxvirus; Diachasmimorpha entomopoxvirus; Melanoplus sanguinipes entomopoxvirus; or some heretofore unclassified Entomopoxvirinae.

[0750] In some embodiments, an IA can be an Entomopoxvirinae family virus selected from the following group: Anomala cuprea entomopoxvirus; Adoxophyes honmai entomopoxvirus; Adoxophyes honmai entomopoxvirus ‘L’; Amsacta moorei entomopoxvirus; Choristoneura biennis entomopoxvirus; Choristoneura fumiferana entomopoxvirus; Choristoneura rosaceana entomopoxvirus; Choristoneura rosaceana entomopoxvirus ‘L’; Heliothis armigera entomopoxvirus; Mythimna separata entomopoxvirus; Mythimna separata entomopoxvirus ‘L’; unclassified Betaentomopoxvirus; Diachasmimorpha longicaudata entomopoxvirus; Melanoplus sanguinipes entomopoxvirus ‘O’; Anacridium aegyptium entomopoxvirus; Calliptamus italicus entomopoxvirus; Chironomus decorus entomopoxvirus; Gomphocerus sibiricus entomopoxvirus; Homona coffearia entomopoxvirus; Linepithema humile entomopoxvirus 1; Oedaleus asiaticus entomopoxvirus; or Pseudaletia separata entomopoxvirus.

[0751] Iridoviridae Family Viruses

[0752] In some embodiments, an IA can be an Iridoviridae family virus, e.g., an Iridovirus.

[0753] In some embodiments, an IA can be an Iridoviridae family virus selected from the following group: Tipula iridescent virus; Invertebrate iridescent virus 31; Armadillidium vulgare iridescent virus; Popillia japonica iridescent virus; Porcellio scaber iridescent virus; Invertebrate iridescent virus 6; Gryllus bimaculatus iridovirus; unclassified Iridovirus; Acetes erythraeus iridovirus; Anticarsia gemmatalis iridescent virus; Armadillidium decorum iridescent virus; Barramundi perch iridovirus; Bluegill sunfish iridovirus; Common ponyfish iridovirus; Crimson snapper iridovirus; Decapterus macrosoma iridovirus; Gazza minuta iridovirus; Invertebrate iridescent virus 16; Costelytra zealandica iridescent virus; Invertebrate iridescent virus 2; Sericesthis iridescent virus; Invertebrate iridescent virus 23; Heteronychus arator iridescent virus; Invertebrate iridescent virus 24; Apis cerana iridescent virus; Invertebrate iridescent virus 29; Tenebrio molitor iridescent virus; Iridovirus barramundi/Quang Ninh/VNM/2008; Iridovirus IV31; Japanese sea bass iridovirus; Lagocephalus sceleratus iridovirus; Lates calcarifer iridovirus; Leiognathus splendens iridovirus; Marble goby iridovirus; Orbiculate batfish iridovirus; Parapristipoma trilineatum iridovirus; Perch iridovirus 603-2/China; Polydactylus sextarius iridovirus; Porcellio siculoccidentalis iridescent virus; Pyrrhalta luteola iridescent virus; Rana temporaria United Kingdom iridovirus 1; Rana temporaria United Kingdom iridovirus 2; Silver sea bream iridovirus; Snakehead iridovirus; Stone flounder iridovirus 603-3/China; Stone flounder iridovirus 724/China; Sturgeon iridovirus; Synodus indicus iridovirus; or Trichoniscus panormidensis iridescent virus.

[0754] Nudiviridae Family Viruses

[0755] In some embodiments, an IA can be an Nudiviridae family virus, e.g., an Alphanudivirus, a Betanudivirus, or some heretofore unclassified Nudiviridae family virus

[0756] In some embodiments, an IA can be an Nudiviridae family virus selected from the following group: Gryllus bimaculatus nudivirus; Oryctes rhinoceros nudivirus; Heliothis zea nudivirus; Helicoverpa zea nudivirus 2; Allomyrina virus; Drosophila innubila nudivirus; Drosophila nudivirus RLU-2011; Esparto virus; Homarus gammarus nudivirus; Kallithea virus; Macrobrachium nudivirus CN-SL2011; Mauternbach virus; Nilaparvata lugens endogenous nudivirus; Penaeus monodon nudivirus; Tipula oleracea nudivirus; or Tomelloso virus.

[0757] Iflaviridae Family Viruses

[0758] In some embodiments, an IA can be an Iflaviridae family virus selected from the following group: Antheraea pernyi iflavirus; Brevicoryne brassicae virus; Brevicoryne brassicae virus—UK; Deformed wing virus; Kakugo virus; VDV-1/DWV recombinant; Dinocampus coccinellae paralysis virus; Ectropis obliqua virus; Ectropis obliqua picorna-like virus; Infectious flacherie virus; Infectious flacherie virus isolate silkworm; Ixodes holocyclus iflavirus; Lygus lineolaris virus 1; Lymantria dispar iflavirus 1; Nilaparvata lugens honeydew virus 1; Perina nuda virus; Sacbrood virus; Sacbrood virus CSBV-LN/China/2009; Slow bee paralysis virus; Spodoptera exigua iflavirus 1; Spodoptera exigua iflavirus 2; Varroa destructor virus 1; unclassified Iflavirus; ACT flea iflavirus; Aedes vexans iflavirus; Armigeres iflavirus; Bat iflavirus; Bee iflavirus 1; Blackberry iflavirus A; Blackberry iflavirus B; Bombyx mori iflavirus; Breves iflavirus; Diamondback moth iflavirus; Formica exsecta virus 2; Haemaphysalis flava iflavirus; Heliconius erato iflavirus; Helicoverpa armigera iflavirus; Midge iflavirus 9000; Miniopterus fuliginosus iflavirus; Moku virus; Nasonia vitripennis virus; Pirizal iflavirus; Psammotettix alienus iflavirus 1; Rondonia iflavirus 1; Rondonia iflavirus 2; Scaphoideus titanus iflavirus 1; Scaphoideus titanus iflavirus 2; VDV-1/DWV recombinant 4; Vespa velutina Moku virus; or Xysticus cristatus iflavirus.

[0759] Baculoviridae Family Viruses

[0760] In some embodiments, an IA can be a virus from the Baculoviridae family. For example, in some embodiments, an IA can be an Alphabaculovirus, Betabaculovirus, Deltabaculovirus, Gammabaculovirus, or heretofore unclassified Baculoviridae virus.

[0761] In some embodiments, an IA can be an Alphabaculovirus virus selected from the following group: Adoxophyes honmai nucleopolyhedrovirus; Agrotis ipsilon multiple nucleopolyhedrovirus; Agrotis segetum nucleopolyhedrovirus A; Agrotis segetum nucleopolyhedrovirus B; Antheraea pernyi nucleopolyhedrovirus; Antheraea proylei nucleopolyhedrovirus; Philosamia cynthia ricini nucleopolyhedrovirus virus; Anticarsia gemmatalis multiple nucleopolyhedrovirus; Autographa californica multiple nucleopolyhedrovirus; Anagrapha falcifera MNPV; Autographa californica nucleopolyhedrovirus; Galleria mellonella MNPV; Plutella xylostella multiple nucleopolyhedrovirus; Rachiplusia nu MNPV; Rachiplusia ou MNPV; Bombyx mori nucleopolyhedrovirus; Bombyx mandarina nucleopolyhedrovirus; Bombyx mandarina nucleopolyhedrovirus S2; Bombyx mori nuclear polyhedrosis virus K1; Buzura suppressaria nucleopolyhedrovirus; Catopsilia pomona nucleopolyhedrovirus; Choristoneura fumiferana DEF multiple nucleopolyhedrovirus; Choristoneura fumiferana multiple nucleopolyhedrovirus; Choristoneura occidentalis alphabaculovirus; Choristoneura murinana nucleopolyhedrovirus; Choristoneura rosaceana nucleopolyhedrovirus; Chrysodeixis chalcites nucleopolyhedrovirus; Chrysodeixis chalcites SNPV TF1-A; Chrysodeixis includens nucleopolyhedrovirus; Pseudoplusia includens SNPV IE; Clanis bilineata nucleopolyhedrovirus; Dasychira pudibunda nucleopolyhedrovirus; Ectropis obliqua nucleopolyhedrovirus; Epiphyas postvittana nucleopolyhedrovirus; Euproctis pseudoconspersa nucleopolyhedrovirus; Helicoverpa armigera nucleopolyhedrovirus; Helicoverpa armigera NPV NNg1; Helicoverpa armigera NPV strain Australia; Helicoverpa armigera nucleopolyhedrovirus G4; Helicoverpa armigera SNPV; Helicoverpa SNPV AC53; Helicoverpa zea single nucleopolyhedrovirus; Hemileuca species nucleopolyhedrovirus; Hemileuca sp. nucleopolyhedrovirus; Hyphantria cunea nucleopolyhedrovirus; Lambdina fiscellaria nucleopolyhedrovirus; Leucania separata nucleopolyhedrovirus; Lonomia obliqua nucleopolyhedrovirus; Lonomia obliqua multiple nucleopolyhedrovirus; Lymantria dispar multiple nucleopolyhedrovirus; Lymantria xylina nucleopolyhedrovirus; Mamestra brassicae multiple nucleopolyhedrovirus; Mamestra configurata nucleopolyhedrovirus A; Mamestra configurata nucleopolyhedrovirus B; Helicoverpa armigera multiple nucleopolyhedrovirus; Maruca vitrata nucleopolyhedrovirus; Mythimna unipuncta nucleopolyhedrovirus; Operophtera brumata nucleopolyhedrovirus; Orgyia leucostigma nucleopolyhedrovirus; Orgyia pseudotsugata multiple nucleopolyhedrovirus; Oxyplax ochracea nucleopolyhedrovirus; Perigonia lusca nucleopolyhedrovirus; Perigonia lusca single nucleopolyhedrovirus; Spodoptera exigua multiple nucleopolyhedrovirus; Spodoptera exigua nuclear polyhedrosis virus (strain US); Spodoptera frugiperda multiple nucleopolyhedrovirus; Spodoptera littoralis nucleopolyhedrovirus; Spodoptera litura nucleopolyhedrovirus; Sucra jujuba nucleopolyhedrovirus; Thysanoplusia orichalcea nucleopolyhedrovirus; Trichoplusia ni single nucleopolyhedrovirus; Wiseana signata nucleopolyhedrovirus; unclassified Alphabaculovirus; Abraxas grossulariata nucleopolyhedrovirus; Actias selene nucleopolyhedrovirus; Adoxophyes orana nucleopolyhedrovirus; Agraulis vanillae MNPV; Agrotis exclamationis nucleopolyhedrovirus; Agrotis ipsilon multicapsid nucleopolyhedrovirus; Amorbia cuneacapsa nucleopolyhedrovirus; Amorbia cuneana nucleopolyhedrovirus; Ampelophaga rubiginosa nucleopolyhedrovirus; Amsacta albistriga nucleopolyhedrovirus; Anagrapha falcifera multiple nucleopolyhedrovirus; Antheraea polyphemus nucleopolyhedrovirus; Anticarsia gemmatalis nucleopolyhedrovirus; Apocheima cinerarium nucleopolyhedrovirus; Aporia crataegi nucleopolyhedrovirus; Archips cerasivoranus nuclear polyhedrosis virus; Archips rosanus nucleopolyhedrovirus; Attacus ricini nuclear polyhedrosis virus; Autographa biloba nucleopolyhedrovirus; Autographa gamma nucleopolyhedrovirus; Autographa nigrisigna nucleopolyhedrovirus; Boarmia bistortata nucleopolyhedrovirus; Bombyx mandarina nuclear polyhedrosis virus; Busseola fusca nucleopolyhedrovirus; Catposilia pomona nucleopolyhedrovirus; Cerapteryx graminis nucleopolyhedrovirus; Choristoneura diversana nucleopolyhedrovirus; Choristoneura occidentalis nucleopolyhedrovirus; Chorizagrotis auxiliaris nucleopolyhedrovirus; Chrysodeixis includens NPV; Coloradia pandora alphabaculovirus; Coloradia pandora nucleopolyhedrovirus; Condylorrhiza vestigialis MNPV; Condylorrhiza vestigialis multiple nucleopolyhedrovirus; Cryptophlebia peltastica nucleopolyhedrovirus; Cyclophragma undans nucleopolyhedrovirus; Dasychira plagiata nucleopolyhedrovirus; Dendrolimus kikuchii nucleopolyhedrovirus; Diaphania pulverulentalis nucleopolyhedrovirus; Dione Juno MNPV tmk1/ARG/2003; Dione Juno nucleopolyhedrovirus; Dirphia peruvianus nucleopolyhedrovirus; Ectropis grisescens nucleopolyhedrovirus; Epinotia granitalis nucleopolyhedrovirus; Euproctis digramma nucleopolyhedrovirus; Gilpinia hercyniae nucleopolyhedrovirus; Heliconius erato nucleopolyhedrovirus; Helicoverpa assulta nucleopolyhedrovirus; Helicoverpa gelotopoeon single nucleopolyhedrovirus; Heliothis peltigera SNPV; Heliothis zea nuclear polyhedrosis virus; Hemerocampa vetusta nucleopolyhedrovirus; Hemileuca alphabaculovirus; Hyposidra infixaria NPV; Hyposidra talaca NPV; Iragoides fasciata nucleopolyhedrovirus; Junonia coenia nucleopolyhedrovirus; Leucoma salicis nucleopolyhedrovirus; Lymantria mathura mutiple nucleopolyhedrovirus; Lymantria monacha nucleopolyhedrovirus; Lymantria xylina nucleopolyhedrovirus 2; Malacosoma alphabaculovirus; Malacosoma americanum nucleopolyhedrovirus; Malacosoma californicum nucleopolyhedrovirus; Malacosoma californicum pluviale nucleopolyhedrovirus; Malacosoma disstria nucleopolyhedrovirus; Malacosoma neustria nucleopolyhedrovirus; Mamestra configurata nucleopolyhedrovirus; Neophasia alphabaculovirus; Nepytia phantasmaria nucleopolyhedrovirus; Nymphalis io nucleopolyhedrovirus; Oak looper alphabaculovirus; Ophiusa disjungens nucleopolyhedrovirus; Orgyia anartoides nucleopolyhedrovirus; Orgyia ericae nucleopolyhedrovirus; Orgyia pseudotsugata single capsid nuclopolyhedrovirus; Panolis flammea nucleopolyhedrovirus; Peridroma alphabaculovirus; Peridroma margaritosa nucleopolyhedrovirus; Perina nuda nucleopolyhedrovirus; Phryganidia californica nucleopolyhedrovirus; Plusia acuta nucleopolyhedrovirus; Plusia orichalcea nuclear polyhedrosis virus; Plutella maculipennis nucleopolyhedrovirus; Pseudaletia alphabaculovirus; Pseudoplusia includens nucleopolyhedrovirus; Pterolocera amplicornis nucleopolyhedrovirus; Rachiplusia nu nucleopolyhedrovirus; Rachiplusia nu single nucleopolyhedrovirus; Samia cynthia nucleopolyhedrovirus; Spilarctia obliqua nucleopolyhedrovirus; Spilosoma obliqua nucleopolyhedrosis virus; Spilosoma phasma nucleopolyhedrovirus; Spodoptera cosmioides nucleopolyhedrovirus; Spodoptera eridania nucleopolyhedrovirus; Spodoptera exempta nucleopolyhedrovirus; Spodoptera littoralis multicapsid nucleopolyhedrovirus; Spodoptera litura MNPV; Spodoptera litura nucleopolyhedrovirus II; Spodoptera terricola nucleopolyhedrovirus; Tineola bisselliella nucleopolyhedrovirus; Troides aeacus nucleopolyhedrovirus; Wiseana cervinata nucleopolyhedrovirus; Agraulis sp. nucleopolyhedrovirus; Malacosoma sp. alphabaculovirus; Malacosoma sp. nucleopolyhedrovirus; Neophasia sp. alphabaculovirus; or unidentified nuclear polyhedrosis viruses.

[0762] In some embodiments, an IA can be a Betabaculovirus virus selected from the following group: Adoxophyes orana granulovirus; Agrotis segetum granulovirus; Artogeia rapae granulovirus; Pieris brassicae granulovirus; Choristoneura fumiferana granulovirus; Choristoneura occidentalis granulovirus; Clostera anachoreta granulovirus; Clostera anastomosis granulovirus A; Clostera anastomosis granulovirus Henan; Clostera anastomosis granulovirus B; Cnaphalocrocis medinalis granulovirus; Cryptophlebia leucotreta granulovirus; Cydia pomonella granulovirus; Cydia pomonella granulosis virus (isolate Mexican); Diatraea saccharalis granulovirus; Epinotia aporema granulovirus; Erinnyis ello granulovirus; Harrisina brillians granulovirus; Helicoverpa armigera granulovirus; Lacanobia oleracea granulovirus; Mocis latipes granulovirus; Mythimna unipuncta granulovirus A; Pseudalatia unipuncta granulovirus; Mythimna unipuncta granulovirus B; Mythimna unipuncta granulovirus; Phthorimaea operculella granulovirus; Plodia interpunctella granulovirus; Plutella xylostella granulovirus; Spodoptera frugiperda granulovirus; Spodoptera litura granulovirus; Trichoplusia ni granulovirus; Trichoplusia ni granulovirus LBIV-12; Xestia c-nigrum granulovirus; Achaea janata granulovirus; Adoxophyes honmai granulovirus; Agrotis exclamationis granulovirus; Amelia pallorana granulovirus; Andraca bipunctata granulovirus; Autographa gamma granulovirus; Caloptilia theivora granulovirus; Choristoneura murinana granulovirus; Choristoneura viridis betabaculovirus; Clostera anastomosis granulovirus; Cnephasia longana granulovirus; Estigmene acrea granulovirus; Euxoa ochrogaster granulovirus; Heliothis armigera granulovirus; Hoplodrina ambigua granulovirus; Hyphantria cunea granulovirus; Natada nararia granulovirus; Nephelodes emmedonia granulovirus; Pandemis limitata granulovirus; Peridorma morpontora granulovirus; Pieris rapae granulovirus; Plathypena scabra granulovirus; Pseudaletia betabaculovirus; Scotogramma trifolii granulovirus; Spodoptera androgea granulovirus; Spodoptera littoralis granulovirus; Tecia solanivora granulovirus; or Mocis sp. granulovirus.

[0763] In some embodiments, an IA can be a Deltabaculovirus virus selected from the following group: Culex nigripalpus nucleopolyhedrovirus; or Culex nigripalpus NPV Florida/1997.

[0764] In some embodiments, an IA can be a Gammabaculovirus virus selected from the following group: Neodiprion lecontei nucleopolyhedrovirus; Neodiprion lecontei NPV (strain Canada); Neodiprion sertifer nucleopolyhedrovirus; unclassified Gammabaculovirus; or Neodiprion abietis NPV.

[0765] In some embodiments, an IA can be some heretofore unclassified Baculoviridae virus selected from the following group: Achaea faber nucleopolyhedrovirus; Aedes sollicitans nucleopolyhedrovirus; Aglais urticae nucleopolyhedrovirus; Agraulis vanillae nucleopolyhedrovirus; Anomis sabulifera nucleopolyhedrovirus; Antheraea yamamai nucleopolyhedrovirus; Anthophila fabriciana granulovirus; Aroa discalis nucleopolyhedrovirus; Baculovirus penaei; Cadra cautella nucleopolyhedrovirus; Chaliopsis junodi nucleopolyhedrovirus; Cotesia marginiventris baculovirus; Cynosarga ornata nucleopolyhedrovirus; Darna nararia granulovirus; Darna trima granulovirus; Erannis defoliaria nucleopolyhedrovirus; Euplexia lucipara granulovirus; Euproctis chrysorrhoea nucleopolyhedrovirus; Euproctis similis nucleopolyhedrovirus; Gonad-specific virus; Homona coffearia granulovirus; Hyblaea puera nucleopolyhedrovirus; Idaea seriata nucleopolyhedrovirus; Junonia coenia granulovirus; Lasiocampa quercus nucleopolyhedrovirus; Lemyra imparilis nucleopolyhedrovirus; Mahasena corbetti nucleopolyhedrovirus; Melanchra persicariae granulovirus; Operophtera bruceata nucleopolyhedrovirus; Orgyia antiqua nucleopolyhedrovirus; Orgyia mixta nucleopolyhedrovirus; Pachytrina philargyria nucleopolyhedrovirus; Pareuchaetes pseudoinsulata nucleopolyhedrovirus; Penaeus monodon nucleopolyhedrovirus; Phalera bucephala nucleopolyhedrovirus; Polygonia c-album nucleopolyhedrovirus; Samia ricini nucleopolyhedrovirus; Spilosoma lutea granulovirus; Spodoptera albula nucleopolyhedrovirus; Trabala vishnou nucleopolyhedrovirus; Uranotaenia sapphirina nucleopolyhedrovirus; Urbanus proteus nucleopolyhedrovirus; Utetheisa pulchella nucleopolyhedrovirus; Vanessa atalanta nucleopolyhedrovirus; Vanessa cardui nucleopolyhedrovirus; Wiseana cervinata granulovirus; or Baculoviridae sp.

[0766] In some embodiments, an IA can be a Baculoviridae virus

[0767] In some embodiments, an IA can be a Beta baculovirus.

[0768] In some embodiments, an IA can be a Adoxophyes orana granulovirus; a Agrotis segetum granulovirus; a Artogeia rapae granulovirus; a Pieris brassicae granulovirus; a Choristoneura fumiferana granulovirus; a Choristoneura occidentalis granulovirus; a Clostera anachoreta granulovirus; a Clostera anastomosis granulovirus A; a Clostera anastomosis granulovirus Henan; a Clostera anastomosis granulovirus B; a Cnaphalocrocis medinalis granulovirus; a Cryptophlebia leucotreta granulovirus; a Cydia pomonella granulovirus; a Cydia pomonella granulosis virus (isolate Mexican); a Diatraea saccharalis granulovirus; a Epinotia aporema granulovirus; a Erinnyis ello granulovirus; a Harrisina brillians granulovirus; a Helicoverpa armigera granulovirus; a Lacanobia oleracea granulovirus; a Mocis latipes granulovirus; a Mythimna unipuncta granulovirus A; a Pseudalatia unipuncta granulovirus; a Mythimna unipuncta granulovirus B; a Mythimna unipuncta granulovirus; a Phthorimaea operculella granulovirus; a Plodia interpunctella granulovirus; a Plutella xylostella granulovirus; a Spodoptera frugiperda granulovirus; a Spodoptera litura granulovirus; a Trichoplusia ni granulovirus; a Trichoplusia ni granulovirus LBIV-12; a Xestia c-nigrum granulovirus; a unclassified Betabaculovirus; a Achaea janata granulovirus; a Adoxophyes honmai granulovirus; a Agrotis exclamationis granulovirus; a Amelia pallorana granulovirus; a Andraca bipunctata granulovirus; a Autographa gamma granulovirus; a Caloptilia theivora granulovirus; a Choristoneura murinana granulovirus; a Choristoneura viridis betabaculovirus; a Clostera anastomosis granulovirus; a Cnephasia longana granulovirus; a Estigmene acrea granulovirus; a Euxoa ochrogaster granulovirus; a Heliothis armigera granulovirus; a Hoplodrina ambigua granulovirus; a Hyphantria cunea granulovirus; a Natada nararia granulovirus; a Nephelodes emmedonia granulovirus; a Pandemis limitata granulovirus; a Peridorma morpontora granulovirus; a Pieris rapae granulovirus; a Plathypena scabra granulovirus; a Pseudaletia betabaculovirus; a Scotogramma trifolii granulovirus; a Spodoptera androgea granulovirus; a Spodoptera littoralis granulovirus; a Tecia solanivora granulovirus; or a Mocis sp. Granulovirus.

[0769] In some embodiments, an IA can be a Cydia pomonella granulovirus.

[0770] In some embodiments, an IA can be a Cydia pomonella granulovirus isolate V22 virus.

[0771] An exemplary complete genome of a Cydia pomonella granulovirus has NCBI Accession No. NC_002816.1; see also, Lugue et al., The complete sequence of the Cydia pomonella granulovirus genome. J Gen Virol. 2001 October; 82(Pt 10):2531-2547; the disclosures of which are incorporated herein by reference in their entireties.

[0772] Exemplary insect viruses, insect virus sequences, and methods for making and using the like, are described in U.S. Pat. No. 5,560,909, entitled “Insecticidal compositions and process for preparation thereof”; U.S. Pat. No. 5,023,182, entitled “Novel virus composition to protect agricultural commodities from insects”; U.S. Pat. No. 6,130,074, entitled “Recombinant insect virus with reduced capacity for host-to-host transmission in the environment and methods to produce said virus”; U.S. Pat. No. 6,177,075, entitled “Insect viruses and their uses in protecting plants”; U.S. Pat. No. 7,271,002, entitled “Production of adeno-associated virus in insect cells”; U.S. Pat. No. 6,042,843, entitled “Baculovirus for the control of insect pests”; WIPO Publication No. WO1997008197A1, entitled “DNA sequence coding for a polypeptide which enhances virus infection of host insects”; and U.S. Pat. No. 5,858,353, entitled “Insect viruses, sequences, insecticidal compositions and methods”; the disclosures of which are incorporated herein by reference in their entireties.

[0773] IAs: Bacteria and Bacterial Toxins

[0774] In some embodiments, an IA can be a bacteria that possesses insecticidal activity when in contact with an insect.

[0775] In some embodiments, an IA can be a peptide or toxin isolated from a bacteria. In some embodiments, an IA can be a bacterial toxin.

[0776] Photorhabdus and/or the Toxins Therefrom

[0777] In some embodiments, an IA can be a bacterial toxin isolated from a bacteria belonging to the Xenorhabdus genus, or Photorhabdus genus.

[0778] In some embodiments, an IA can be a Photorhabdus toxin.

[0779] In some embodiments, an IA can be a Photorhabdus toxin selected from the group consisting of: Photorhabdus akhurstii toxin; Photorhabdus asymbiotica toxin; Photorhabdus asymbiotica subsp. asymbiotica toxin; Photorhabdus asymbiotica subsp. asymbiotica ATCC 43949 toxin; Photorhabdus australis toxin; Photorhabdus australis DSM 17609 toxin; Photorhabdus bodei toxin; Photorhabdus caribbeanensis toxin; Photorhabdus cinerea toxin; Photorhabdus hainanensis toxin; Photorhabdus heterorhabditis toxin; Photorhabdus kayaii toxin; Photorhabdus khanii toxin; Photorhabdus khanii NC19 toxin; Photorhabdus khanii subsp. guanajuatensis toxin; Photorhabdus kleinii toxin; Photorhabdus laumondii toxin; Photorhabdus laumondii subsp. clarkei toxin; Photorhabdus laumondii subsp. laumondii toxin; Photorhabdus laumondii subsp. laumondii TTO1 toxin; Photorhabdus luminescens toxin; Photorhabdus luminescens BA1 toxin; Photorhabdus luminescens NBAII H75HRPL105 toxin; Photorhabdus luminescens NBAII HiPL101 toxin; Photorhabdus luminescens subsp. luminescens toxin; Photorhabdus luminescens subsp. luminescens ATCC 29999 toxin; Photorhabdus luminescens subsp. mexicana toxin; Photorhabdus luminescens subsp. sonorensis toxin; Photorhabdus namnaonensis toxin; Photorhabdus noenieputensis toxin; Photorhabdus stackebrandtii toxin; Photorhabdus tasmaniensis toxin; Photorhabdus temperata toxin; Photorhabdus temperata J3 toxin; Photorhabdus temperata subsp. phorame toxin; Photorhabdus temperata subsp. temperata toxin; Photorhabdus temperata subsp. temperata M1021 toxin; Photorhabdus temperata subsp. temperata Meg1 toxin; Photorhabdus thracensis toxin; unclassified Photorhabdus toxin; Photorhabdus sp. toxin; Photorhabdus sp. 3014 toxin; Photorhabdus sp. 3240 toxin; Photorhabdus sp. Az29 toxin; Photorhabdus sp. BS21 toxin; Photorhabdus sp. CbKj163 toxin; Photorhabdus sp. CRCIA-P01 toxin; Photorhabdus sp. ENY toxin; Photorhabdus sp. FL2122 toxin; Photorhabdus sp. FL480 toxin; Photorhabdus sp. FsIw96 toxin; Photorhabdus sp. GDd233 toxin; Photorhabdus sp. H3086 toxin; Photorhabdus sp. H3107 toxin; Photorhabdus sp. H3240 toxin; Photorhabdus sp. HB301 toxin; Photorhabdus sp. HB78 toxin; Photorhabdus sp. HB89 toxin; Photorhabdus sp. HIT toxin; Photorhabdus sp. HO1 toxin; Photorhabdus sp. HUG-39 toxin; Photorhabdus sp. IT toxin; Photorhabdus sp. JUN toxin; Photorhabdus sp. KcTs129 toxin; Photorhabdus sp. KJ13.1 TH toxin; Photorhabdus sp. KJ14.3 TH toxin; Photorhabdus sp. KJ24.5 TH toxin; Photorhabdus sp. KJ29.1 TH toxin; Photorhabdus sp. KJ37.1 TH toxin; Photorhabdus sp. KJ7.1 TH toxin; Photorhabdus sp. KJ8.2 TH toxin; Photorhabdus sp. KJ9.1 TH toxin; Photorhabdus sp. KJ9.2 TH toxin; Photorhabdus sp. KK1.3 TH toxin; Photorhabdus sp. KK1.4 TH toxin; Photorhabdus sp. KMD74 toxin; Photorhabdus sp. KOH toxin; Photorhabdus sp. MID10 toxin; Photorhabdus sp. MOL toxin; Photorhabdus sp. MSW 058 toxin; Photorhabdus sp. MSW 079 toxin; Photorhabdus sp. NK2.1 TH toxin; Photorhabdus sp. NK2.5 TH toxin; Photorhabdus sp. NnMt2h toxin; Photorhabdus sp. NP1 toxin; Photorhabdus sp. OH10 toxin; Photorhabdus sp. OnIr40 toxin; Photorhabdus sp. OnKn2 toxin; Photorhabdus sp. PB10.1 TH toxin; Photorhabdus sp. PB16.3 TH toxin; Photorhabdus sp. PB17.1 TH toxin; Photorhabdus sp. PB17.3 TH toxin; Photorhabdus sp. PB2.5 TH toxin; Photorhabdus sp. PB22.4 TH toxin; Photorhabdus sp. PB22.5 TH toxin; Photorhabdus sp. PB32.1 TH toxin; Photorhabdus sp. PB33.1 TH toxin; Photorhabdus sp. PB33.4 TH toxin; Photorhabdus sp. PB37.4 TH toxin; Photorhabdus sp. PB39.2 TH toxin; Photorhabdus sp. PB4.5 TH toxin; Photorhabdus sp. PB41.4 TH toxin; Photorhabdus sp. PB45.5 TH toxin; Photorhabdus sp. PB47.1 TH toxin; Photorhabdus sp. PB47.3 TH toxin; Photorhabdus sp. PB5.1 TH toxin; Photorhabdus sp. PB5.4 TH toxin; Photorhabdus sp. PB50.4 TH toxin; Photorhabdus sp. PB51.4 TH toxin; Photorhabdus sp. PB52.2 TH toxin; Photorhabdus sp. PB54.4 TH toxin; Photorhabdus sp. PB58.2 TH toxin; Photorhabdus sp. PB58.4 TH toxin; Photorhabdus sp. PB58.5 TH toxin; Photorhabdus sp. PB59.2 TH toxin; Photorhabdus sp. PB6.5 TH toxin; Photorhabdus sp. PB67.2 TH toxin; Photorhabdus sp. PB67.4 TH toxin; Photorhabdus sp. PB68.1 TH toxin; Photorhabdus sp. PB7.5 TH toxin; Photorhabdus sp. PB76.1 TH toxin; Photorhabdus sp. PB76.4 TH toxin; Photorhabdus sp. PB76.5 TH toxin; Photorhabdus sp. PB78.2 TH toxin; Photorhabdus sp. PB80.3 TH toxin; Photorhabdus sp. PB80.4 TH toxin; Photorhabdus sp. Pjun toxin; Photorhabdus sp. RW14-46 toxin; Photorhabdus sp. S10-54 toxin; Photorhabdus sp. S12-55 toxin; Photorhabdus sp. S14-60 toxin; Photorhabdus sp. S15-56 toxin; Photorhabdus sp. S5P8-50 toxin; Photorhabdus sp. S7-51 toxin; Photorhabdus sp. S8-52 toxin; Photorhabdus sp. S9-53 toxin; Photorhabdus sp. SJ2 toxin; Photorhabdus sp. SN259 toxin; Photorhabdus sp. SP1.5 TH toxin; Photorhabdus sp. SP16.4 TH toxin; Photorhabdus sp. SP21.5 TH toxin; Photorhabdus sp. SP3.4 TH toxin; Photorhabdus sp. SP4.5 TH toxin; Photorhabdus sp. SP7.3 TH toxin; Photorhabdus sp. TyKb140 toxin; Photorhabdus sp. UK76 toxin; Photorhabdus sp. VMG toxin; Photorhabdus sp. WA21C toxin; Photorhabdus sp. WkSs43 toxin; Photorhabdus sp. Wx13 toxin; Photorhabdus sp. X₄ toxin; Photorhabdus sp. YNb90 toxin; and Photorhabdus sp. ZM toxin.

[0780] In some embodiments, an IA can be a Photorhabdus luminescens toxin.

[0781] In some embodiments, an IA can be a Photorhabdus luminescens toxin, wherein the Photorhabdus luminescens toxin comprises a Photorhabdus luminescens “toxin complex a” (Tca).

[0782] In some embodiments, an IA can be a Photorhabdus luminescens toxin, wherein the Photorhabdus luminescens toxin comprises a Photorhabdus luminescens “toxin complex c” (Tcc).

[0783] In some embodiments, an IA can be a Photorhabdus luminescens toxin, wherein the Photorhabdus luminescens toxin comprises a Photorhabdus luminescens “toxin complex d” (Tcd).

[0784] In some embodiments, an IA can be a Tca comprises a TcaA protein (SEQ ID NO: 616), a TcaB protein (SEQ ID NO: 617), a TcaC protein (SEQ ID NO: 618), and a TcaZ protein (SEQ ID NO: 619).

[0785] Exemplary Photorhabdus luminescens toxin peptides, nucleotides, sequences, and methods of making and using the same, are described in U.S. Pat. No. 7,491,698, entitled “Mixing and matching TC proteins for pest control”; U.S. Pat. No. 6,281,413, entitled “Insecticidal toxins from Photorhabdus luminescens and nucleic acid sequences coding therefor”; U.S. Pat. No. 6,630,619, entitled, “Toxin genes from the bacteria Xenorhabdus nematophilus and Photorhabdus luminescens”; U.S. Pat. No. 6,528,484, entitled “Insecticidal protein toxins from Photorhabdus”; U.S. Pat. No. 7,777,100, entitled “DNA sequences from tcd genomic region of Photorhabdus luminescens”; U.S. Pat. No. 7,161,062, entitled “DNA Sequences from Photorhabdus luminescens”; U.S. Patent Application Publication No. 20030207806, entitled “Insecticidal protein toxins from Photorhabdus”; U.S. Patent Application Publication No. 20070020625 A1, entitled “Sequence of the Photorhabdus luminescens strain tt01 genome and uses”; and U.S. Pat. No. 7,268,275, entitled “tcdB2 protein from Photorhabdus luminescens W-14”; the disclosures of which are incorporated herein by reference in their entireties.

[0786] Yersinia Organisms, and the Products Therefrom

[0787] In some embodiments, an IA can be one or more organisms belonging to the Yersinia genus.

[0788] In some embodiments, an IA can be one or more peptides isolated from an organism belonging to the Yersinia genus.

[0789] In some embodiments, an IA can be one or more of the following species: Yersinia aldovaeyb, Yersinia aleksiciae, Yersinia bercovieri, Yersinia canariae, Yersinia enterocolitica, Yersinia enterocolitica subsp. enterocolitica, Yersinia enterocolitica subsp. palearctica, Yersinia entomophaga, Yersinia frederiksenii, Yersinia hibernica, Yersinia intermedia, Yersinia kristensenii, Yersinia kristensenii subsp. kristensenii, Yersinia kristensenii subsp. rochesterensis, Yersinia massiliensis, Yersinia mollaretii, Yersinia nurmii, Yersinia pekkanenii, Yersinia pestis, Yersinia pestis subsp. pestis, Yersinia pestis subsp. medievalis, Yersinia pestis subsp. orientalis, Yersinia pseudotuberculosis, Yersinia pseudotuberculosis subsp. pestis, Yersinia pseudotuberculosis subsp. pseudotuberculosis, Yersinia rohdei, Yersinia ruckeri, Yersinia similis, or Yersinia wautersii.

[0790] In some embodiments, an IA can be one or more peptides isolated from one or more of the following species: Yersinia aldovaeyb, Yersinia aleksiciae, Yersinia bercovieri, Yersinia canariae, Yersinia enterocolitica, Yersinia enterocolitica subsp. enterocolitica, Yersinia enterocolitica subsp. palearctica, Yersinia entomophaga, Yersinia frederiksenii, Yersinia hibernica, Yersinia intermedia, Yersinia kristensenii, Yersinia kristensenii subsp. kristensenii, Yersinia kristensenii subsp. rochesterensis, Yersinia massiliensis, Yersinia mollaretii, Yersinia nurmii, Yersinia pekkanenii, Yersinia pestis, Yersinia pestis subsp. pestis, Yersinia pestis subsp. medievalis, Yersinia pestis subsp. orientalis, Yersinia pseudotuberculosis, Yersinia pseudotuberculosis subsp. pestis, Yersinia pseudotuberculosis subsp. pseudotuberculosis, Yersinia rohdei, Yersinia ruckeri, Yersinia similis, or Yersinia wautersii.

[0791] In some embodiments, an IA can be Yersinia entomophaga or Yersinia nurmii.

[0792] In some embodiments, an IA can be one or more peptides isolated from Yersinia entomophaga or Yersinia nurmii.

[0793] Briefly, Yersinia entomophaga is a gram-negative, rod-shaped, non-spore-forming bacterium isolated from diseased larvae of the New Zealand grass grub. Likewise, Yersinia nurmii is also a gram-negative, rod-shaped strain, albeit originating from broiler meat packaged under a modified atmosphere. See Hurst et al., The main virulence determinant of Yersinia entomophaga MH96 is a broad-host-range toxin complex active against insects. J Bacteriol. 2011 April; 193(8):1966-80; and Landsberg et al., 3D structure of the Yersinia entomophaga toxin complex and implications for insecticidal activity. Proc Natl Acad Sci USA. 2011 Dec. 20; 108(51):20544-9.

[0794] In some embodiments, an IA can be a Yersinia entomophaga bacteria, and/or a toxin therefrom.

[0795] In some embodiments, an IA can be one or more Yersinia nurmii bacteria, and/or a toxin therefrom.

[0796] In some embodiments, an IA can be one or more Yersinia entomophaga bacteria and/or a toxin therefrom, and one or more Yersinia nurmii bacteria and/or a toxin therefrom.

[0797] Exemplary methods of making and using Yersinia- and Yersinia-toxin-containing mixtures is disclosed in PCT Application No. WO2018175677A1, entitled “COMBINATIONS OF YERSINIA ENTOMOPHAGA AND PESTICIDES OR OTHER SUBSTANCES” (Assignee: Novozymes Bioag A/S), the disclosure of which is incorporated herein by reference in its entirety.

[0798] Bacillus thuringiensis Organisms, and the Products Therefrom

[0799] “Bt” are the initials for a bacterium called Bacillus thuringiensis. The Bt bacteria produces a family of peptides that are toxic to many insects. The Bt toxic peptides are well known for their ability to produce parasporal crystalline protein inclusions (usually referred to as crystals) that fall under two major classes of toxins; cytolysins (Cyt) and crystal Bt proteins (Cry). Since the cloning and sequencing of the first crystal proteins genes in the early-1980s, many others have been characterized and are now classified according to the nomenclature of Crickmore et al. (1998). Generally, Cyt proteins are toxic towards the insect orders Coleoptera (beetles) and Diptera (flies), and Cry proteins target Lepidopterans (moths and butterflies). Cry proteins bind to specific receptors on the membranes of mid-gut (epithelial) cells resulting in rupture of those cells. If a Cry protein cannot find a specific receptor on the epithelial cell to which it can bind, then it is not toxic. Bt strains can have different complements of Cyt and Cry proteins, thus defining their host ranges. The genes encoding many Cry proteins have been identified.

[0800] Currently there are four main pathotypes of insecticidal Bt parasporal peptides based on order specificity: Lepidoptera-specific (CryI, now Cry1), Coleoptera-specific (CryIII, now Cry3), Diptera-specific (CryIV, now Cry4, Cry 10, Cry11; and CytA, now Cyt1A), and CryII (Now Cry2), the only family known at that time to have dual (Lepidoptera and Diptera) specificity. Cross-order activity is now apparent in many cases.

[0801] The nomenclature assigns holotype sequences a unique name which incorporates ranks based on the degree of divergence, with the boundaries between the primary (Arabic numeral), secondary (uppercase letter), and tertiary (lower case letter) rank representing approximately 95%, 78% and 45% identities. A fourth rank (another Arabic number) is used to indicate independent isolations of holotype toxin genes with sequences that are identical or differ only slightly. Currently, the nomenclature distinguishes 174 holotype sequences that are grouping in 55 cry and 2 cyt families (Crickmore, N., Zeigler, D. R., Schnepf, E., Van Rie, J., Lereclus, D., Daum, J, Bravo, A., Dean, D. H., B. thuringiensis toxin nomenclature). Any of these crystal proteins and the genes that produce them may be used to produce a suitable Bt related toxin for this invention.

[0802] Also included in the descriptions of this invention are families of highly related crystal proteins produced by other bacteria: Cry16 and Cry17 from Clostridium bifermentans (Barloy et al., 1996, 1998), Cry 18 from Bacillus popilliae (Zhang et al., 1997), Cry43 from Paenibacillus lentimorbis (Yokoyama et al., 2004) and the binary Cry48/Cry49 produced by Bacillus sphaericus (Jones et al., 2008). Other crystalline or secreted pesticidal proteins, such as the S-layer proteins (Pena et al., 2006) that are included here are, genetically altered crystal proteins, except those that were modified through single amino acid substitutions (e.g., Lambert et al., 1996). Any of these genes may be used to produce a suitable Bt related toxin for this invention.

[0803] Naturally occurring allelic variants can be identified with the use of well-known molecular biology techniques, such as polymerase chain reaction (PCR) and hybridization techniques as outlined below. Variant nucleotide sequences also include synthetically derived nucleotide sequences that have been generated, for example, by using site-directed mutagenesis but which still encode the Bt protein proteins disclosed in the present disclosure as discussed below. Variant proteins encompassed by the present disclosure are biologically active, that is they continue to possess the desired biological activity of the native protein, i.e., retaining pesticidal activity. By “retains activity” is intended that the variant will have at least about 30%, at least about 50%, at least about 70%, or at least about 80% of the pesticidal activity of the native protein. Methods for measuring pesticidal activity are well known in the art. See, for example, Czapla and Lang (1990) J. Econ. Entomol. 83: 2480-2485; Andrews et al. (1988) Biochem. J. 252:199-206; Marrone et al. (1985) J. of Economic Entomology 78:290-293; and U.S. Pat. No. 5,743,477, all of which are herein incorporated by reference in their entirety, and all sequences identified by number specifically incorporated by reference.

[0804] Bt proteins and gene descriptions are described below in the following the following tables, which contain the Bt toxin and corresponding reference, each of which is incorporated by reference in its entirety.

TABLE 4
Bt Toxins and References.

| Toxin | Patents or Patent Publication Number |
|---|---|
| Cry1 | US2003046726, U.S. Pat. No. 6,833,449, |
| | CN1260397, US201026939, |
| | US2006174372, US2006174372, |
| | US642241, U.S. Pat. No. 6,229,004, |
| | US2004194165, U.S. Pat. No. 6,573,240, |
| | U.S. Pat. No. 5,424,409, U.S. Pat. No. 5,407,825, |
| | U.S. Pat. No. 5,135,867, U.S. Pat. No. 5,055,294, |
| Cry1 | WO2007107302, U.S. Pat. No. 6,855,873, |
| | WO2004020636, US2007061919, |
| | U.S. Pat. No. 6,048,839, US2007061919, |
| | AU784649B, US2007061919, U.S. Pat. No. 6,150,589, |
| | U.S. Pat. No. 5,679,343, U.S. Pat. No. 5,616,319, U.S. Pat. No. |
| | 5,322,687, |
| Cry1 | WO2007107302, US2006174372, |
| | US2005091714, US2004058860, |
| | US2008020968, U.S. Pat. No. 6,043,415, U.S. Pat. No. |
| | 5,942,664, |
| Cry1 | WO2007107302, US2007061919, |
| | U.S. Pat. No. 6,172,281, |
| Cry1 | WO03082910, MX9606262, U.S. Pat. No. 5,530,195, |
| | U.S. Pat. No. 5,407,825, U.S. Pat. No. 5,045,469, |
| Cry1 | US2006174372, |
| Cry1 | US2007061919, |
| Cry1 | US2007061919, |
| Cry1 | US2007061919, CN1401772, U.S. Pat. No. 6,063,605, |
| Cry1 | US2007061919, AU784649B, U.S. Pat. No. 5,723,758, |
| | U.S. Pat. No. 5,616,319, U.S. Pat. No. 5,356,623, U.S. Pat. No. |
| | 5,322,687 |
| Cry1 | U.S. Pat. No. 5,723,758 |
| Cry2 | CN1942582, WO9840490, |
| | US2007061919, UA75570, |
| | MXPA03006130, US2003167517, |
| | U.S. Pat. No. 6,107,278, U.S. Pat. No. 6,096,708, U.S. Pat. No. |
| | 5,073,632, U.S. Pat. No. 7,208,474, U.S. Pat. No. 7,244,880, |
| Cry3 | US2002152496, RU2278161, |
| | US2003054391, |
| Cry3 | U.S. Pat. No. 5,837,237, U.S. Pat. No. 5,723,756, U.S. Pat. No. |
| | 5,683,691, U.S. Pat. No. 5,104,974, U.S. Pat. No. 4,996,155, |
| Cry3 | U.S. Pat. No. 5,837,237, U.S. Pat. No. 5,723,756, |
| Cry5 | WO9840491, US2004018982, U.S. Pat. No. 6,166,195, |
| | US2001010932, U.S. Pat. No. 5,985,831, U.S. Pat. No. |
| | 5,824,792, US528153 |
| Cry5 | WO2007062064, US2001010932, |
| | U.S. Pat. No. 5,824,792, |
| Cry6 | WO2007062064, US2004018982, |
| | U.S. Pat. No. 5,973,231, U.S. Pat. No. 5,874,288, U.S. Pat. No. |
| | 5,236,843, US683106 |
| Cry6 | US2004018982, U.S. Pat. No. 6,166,195, |
| Cry7 | U.S. Pat. No. 6,048,839, U.S. Pat. No. 5,683,691, U.S. Pat. No. |
| | 5,378,625, US518709 |
| Cry7 | CN195215 |
| Cry8 | |
| Cry8 | |
| Cry8 | US200301796 |
| Cry8 | WO2006053473, US2007245430, |
| Cry8 | WO200605347 |
| Cry9 | US2007061919, |
| Cry9 | WO200506620 |
| Cry9 | US2007061919, U.S. Pat. No. 6,448,226, |
| | US2005097635, WO2005066202, |
| | U.S. Pat. No. 6,143,550, U.S. Pat. No. 6,028,246, U.S. Pat. No. |
| | 6,727,409, |
| Cry9 | US2005097635, WO2005066202, |
| Cry9 | U.S. Pat. No. 6,570,005, |
| Cry9 | AU784649B, US2007074308, |
| | US736180 |
| Cry11 | MXPA0200870 |
| Cry12 | US2004018982, U.S. Pat. No. 6,166,195, |
| | U.S. Pat. No. 6,077,937, U.S. Pat. No. 5,824,792, U.S. Pat. No. |
| | 5,753,492, |
| Cry13 | US2004018982, U.S. Pat. No. 6,166,195, |
| | U.S. Pat. No. 6,077,937, U.S. Pat. No. 5,824,792, U.S. Pat. No. |
| | 5,753,492, |
| Cry14 | JP2007006895, U.S. Pat. No. 5,831,011, |
| Cry21 | U.S. Pat. No. 5,831,011, U.S. Pat. No. 5,670,365, |
| Cry22 | US2006218666, US2001010932, |
| | MXPA01004361, U.S. Pat. No. 5,824,792, |
| Cry22 | US2003229919, |
| Cry23 | US2006051822, US2003144192, |
| | UA75317, U.S. Pat. No. 6,399,330, U.S. Pat. No. 6,326,351, |
| | U.S. Pat. No. 6,949,626, |
| Cry26 | US200315001 |
| Cry28 | US200315001 |
| Cry31 | CA2410153, |
| Cry34 | US200316752 |
| Cry35 | US2003167522, |
| Cry37 | US2006051822, US2003144192, |
| | UA75317, U.S. Pat. No. 6,399,330, U.S. Pat. No. 6,326,351, |
| | U.S. Pat. No. 6,949,626, |
| Cry43 | US200527164 |
| Cyt1 | WO2007027776, |
| Cyt1 | U.S. Pat. No. 6,150,165, |
| Cyt2 | US2007163000, EP1681351, |
| | U.S. Pat. No. 6,686,452, U.S. Pat. No. 6,537,756, |

TABLE 5
Hybrid Insecticidal Crystal Proteins and Patents.

| Patent No. | Holotype Toxin |
|---|---|
| US2008020967 | Cry29Aa |
| US2008040827 | Cry1Ca |
| US2007245430 | Cry8Aa |
| US2008016596 | Cry8Aa |
| US2008020968 | Cry1Cb |

TABLE 6
Patents Relating to Other Hybrid Insecticidal Crystal Proteins.

| Holotype Toxin | Patent No. |
|---|---|
| Cry23A, Cry37A | U.S. Pat. No. 7,214,788 |
| Cry1A | U.S. Pat. No. 7,019,197 |
| Cry1A, Cry1B | U.S. Pat. No. 6,320,100 |
| Cry1A, Cry1C | AU2001285900B |
| Cry23A, Cry37A | US2007208168 |
| Cry3A, Cry1I, Cry1B | WO0134811 |
| Cry3A, Cry3B, Cry3C | US2004033523 |
| Cry1A, Cry1C, Cry1E, Cry1G | U.S. Pat. No. 6,780,408 |
| Cry1A, Cry1F | US2008047034 |

[0805] Novel mixtures, formulations, and/or compositions comprising a CRIP and an IA can be used to control, kill and/or inhibit pests such as insects.

[0806] In some embodiments, an IA can be a Bacillus thuringiensis organism.

[0807] In some embodiments, an IA can be a Bacillus thuringiensis toxin.

[0808] In some embodiments, an IA can be a Bacillus thuringiensis subspecies. For example, in some embodiments, the Bacillus thuringiensis subspecies can be one of the following subspecies: aizawai; aizawai/pacificus; alesti; amagiensis; andalousiensis; argentinensis; asturiensis; azorensis; balearica; berliner; bolivia; brasilensis; cameroun; canadensis; chanpaisis; chinensis; colmeri; coreanensis; dakota; darmstadiensis; dendrolimus; entomocidus; entomocidus/subtoxicus; finitimus; fukuokaensis; galechiae; galleriae; graciosensis; guiyangiensis; higo; huazhongensis; iberica; indiana; israelensis; israelensis/tochigiensis; japonensis; jegathesan; jinghongiensis; kenyae; kim; kumamtoensis; kurstaki; kyushuensis; leesis; londrina; malayensis; medellin; mexicanensis; mogi; monterrey; morrisoni; muju; navarrensis; neoleonensis; nigeriensis; novosibirsk, ostriniae; oswaldocruzi; pahangi; pakistani; palmanyolensis; pingluonsis; pirenaica; poloniensis; pondicheriensis; pulsiensis; rongseni; roskildiensis; san diego; seoulensis; shandongiensis; silo; sinensis; sooncheon; sotto; sotto/dendrolimus; subtoxicus; sumiyoshiensis; sylvestriensis; tenebrionis; thailandensis; thompsoni; thuringiensis; tochigiensis; toguchini; tohokuensis; tolworthi; toumanoffi; vazensis; wratislaviensis; wuhanensis; xiaguangiensis; yosoo; yunnanensis; zhaodongensis; str. Al Hakam; or konkukian.

[0809] In some embodiments, an IA can be a Bacillus thuringiensis var. or varietas. For example, in some embodiments, an IA can be a Bacillus thuringiensis var. selected from the following group: Bacillus thuringiensis var. aizawai; Bacillus thuringiensis var. aizawai/pacificus; Bacillus thuringiensis var. alesti; Bacillus thuringiensis var. amagiensis; Bacillus thuringiensis var. andalousiensis; Bacillus thuringiensis var. argentinensis; Bacillus thuringiensis var. asturiensis; Bacillus thuringiensis var. azorensis; Bacillus thuringiensis var. balearica; Bacillus thuringiensis var. berliner; Bacillus thuringiensis var. bolivia; Bacillus thuringiensis var. brasilensis; Bacillus thuringiensis var. cameroun; Bacillus thuringiensis var. canadensis; Bacillus thuringiensis var. chanpaisis; Bacillus thuringiensis var. chinensis; Bacillus thuringiensis var. colmeri; Bacillus thuringiensis var. coreanensis; Bacillus thuringiensis var. dakota; Bacillus thuringiensis var. darmstadiensis; Bacillus thuringiensis var. dendrolimus; Bacillus thuringiensis var. entomocidus; Bacillus thuringiensis var. entomocidus/subtoxicus; Bacillus thuringiensis var. finitimus; Bacillus thuringiensis var. fukuokaensis; Bacillus thuringiensis var. galechiae; Bacillus thuringiensis var. galleriae; Bacillus thuringiensis var. graciosensis; Bacillus thuringiensis var. guiyangiensis; Bacillus thuringiensis var. higo; Bacillus thuringiensis var. huazhongensis; Bacillus thuringiensis var. iberica; Bacillus thuringiensis var. indiana; Bacillus thuringiensis var. israelensis; Bacillus thuringiensis var. israelensis/tochigiensis; Bacillus thuringiensis var. japonensis; Bacillus thuringiensis var. jegathesan; Bacillus thuringiensis var. jinghongiensis; Bacillus thuringiensis var. kenyae; Bacillus thuringiensis var. kim; Bacillus thuringiensis var. kumamtoensis; Bacillus thuringiensis var. kunthalanags3; Bacillus thuringiensis var. kunthalaRX24; Bacillus thuringiensis var. kunthalaRX27; Bacillus thuringiensis var. kunthalaRX28; Bacillus thuringiensis var. kurstaki; Bacillus thuringiensis var. kyushuensis; Bacillus thuringiensis var. leesis; Bacillus thuringiensis var. londrina; Bacillus thuringiensis var. malayensis; Bacillus thuringiensis var. medellin; Bacillus thuringiensis var. mexicanensis; Bacillus thuringiensis var. mogi; Bacillus thuringiensis var. monterrey; Bacillus thuringiensis var. morrisoni; Bacillus thuringiensis var. muju; Bacillus thuringiensis var. navarrensis; Bacillus thuringiensis var. neoleonensis; Bacillus thuringiensis var. nigeriensis; Bacillus thuringiensis var. novosibirsk; Bacillus thuringiensis var. ostriniae; Bacillus thuringiensis var. oswaldocruzi; Bacillus thuringiensis var. pahangi; Bacillus thuringiensis var. pakistani; Bacillus thuringiensis var. palmanyolensis; Bacillus thuringiensis var. pingluonsis; Bacillus thuringiensis var. pirenaica; Bacillus thuringiensis var. poloniensis; Bacillus thuringiensis var. pondicheriensis; Bacillus thuringiensis var. pulsiensis; Bacillus thuringiensis var. rongseni; Bacillus thuringiensis var. roskildiensis; Bacillus thuringiensis var. san diego; Bacillus thuringiensis var. seoulensis; Bacillus thuringiensis var. shandongiensis; Bacillus thuringiensis var. silo; Bacillus thuringiensis var. sinensis; Bacillus thuringiensis var. sooncheon; Bacillus thuringiensis var. sotto; Bacillus thuringiensis var. sotto/dendrolimus; Bacillus thuringiensis var. subtoxicus; Bacillus thuringiensis var. sumiyoshiensis; Bacillus thuringiensis var. sylvestriensis; Bacillus thuringiensis var. tenebrionis; Bacillus thuringiensis var. thailandensis; Bacillus thuringiensis var. thompsoni; Bacillus thuringiensis var. thuringiensis; Bacillus thuringiensis var. tochigiensis; Bacillus thuringiensis var. toguchini; Bacillus thuringiensis var. tohokuensis; Bacillus thuringiensis var. tolworthi; Bacillus thuringiensis var. toumanoffi; Bacillus thuringiensis var. vazensis; Bacillus thuringiensis var. wratislaviensis; Bacillus thuringiensis var. wuhanensis; Bacillus thuringiensis var. xiaguangiensis; Bacillus thuringiensis var. yosoo; Bacillus thuringiensis var. yunnanensis; Bacillus thuringiensis var. zhaodongensis; Bacillus thuringiensis str. Al Hakam; Bacillus thuringiensis T01-328; Bacillus thuringiensis YBT-1518; or Bacillus thuringiensis var. konkukian.

[0810] In some embodiments, an IA can be a Bacillus thuringiensis serovar. For example, in some embodiments, an IA can be a Bacillus thuringiensis serovar selected from the following group: Bacillus thuringiensis AKS-7; Bacillus thuringiensis Bt18247; Bacillus thuringiensis Bt18679; Bacillus thuringiensis Bt407; Bacillus thuringiensis DAR 81934; Bacillus thuringiensis DB27; Bacillus thuringiensis F14-1; Bacillus thuringiensis FC1; Bacillus thuringiensis FC10; Bacillus thuringiensis FC2; Bacillus thuringiensis FC6; Bacillus thuringiensis FC7; Bacillus thuringiensis FCB; Bacillus thuringiensis FC9; Bacillus thuringiensis HD-771; Bacillus thuringiensis HD-789; Bacillus thuringiensis HD1002; Bacillus thuringiensis IBL 200; Bacillus thuringiensis IBL 4222; Bacillus thuringiensis IM-Mgvxx-63; Bacillus thuringiensis LDC 391; Bacillus thuringiensis LM1212; Bacillus thuringiensis MC28; Bacillus thuringiensis Sbt003; Bacillus thuringiensis serovar aizawai; Bacillus thuringiensis serovar aizawai/pacificus; Bacillus thuringiensis serovar alesti; Bacillus thuringiensis serovar amagiensis; Bacillus thuringiensis serovar andalousiensis; Bacillus thuringiensis serovar argentinensis; Bacillus thuringiensis serovar asturiensis; Bacillus thuringiensis serovar azorensis; Bacillus thuringiensis serovar balearica; Bacillus thuringiensis serovar berliner; Bacillus thuringiensis serovar bolivia; Bacillus thuringiensis serovar brasilensis; Bacillus thuringiensis serovar cameroun; Bacillus thuringiensis serovar canadensis; Bacillus thuringiensis serovar chanpaisis; Bacillus thuringiensis serovar chinensis; Bacillus thuringiensis serovar colmeri; Bacillus thuringiensis serovar coreanensis; Bacillus thuringiensis serovar dakota; Bacillus thuringiensis serovar darmstadiensis; Bacillus thuringiensis serovar dendrolimus; Bacillus thuringiensis serovar entomocidus; Bacillus thuringiensis serovar entomocidus/subtoxicus; Bacillus thuringiensis serovar finitimus; Bacillus thuringiensis serovar fukuokaensis; Bacillus thuringiensis serovar galechiae; Bacillus thuringiensis serovar galleriae; Bacillus thuringiensis serovar graciosensis; Bacillus thuringiensis serovar guiyangiensis; Bacillus thuringiensis serovar higo; Bacillus thuringiensis serovar huazhongensis; Bacillus thuringiensis serovar iberica; Bacillus thuringiensis serovar indiana; Bacillus thuringiensis serovar israelensis; Bacillus thuringiensis serovar israelensis/tochigiensis; Bacillus thuringiensis serovar japonensis; Bacillus thuringiensis serovar jegathesan; Bacillus thuringiensis serovar jinghongiensis; Bacillus thuringiensis serovar kenyae; Bacillus thuringiensis serovar kim; Bacillus thuringiensis serovar kumamtoensis; Bacillus thuringiensis serovar kunthalanags3; Bacillus thuringiensis serovar kunthalaRX24; Bacillus thuringiensis serovar kunthalaRX27; Bacillus thuringiensis serovar kunthalaRX28; Bacillus thuringiensis serovar kurstaki; Bacillus thuringiensis serovar kyushuensis; Bacillus thuringiensis serovar leesis; Bacillus thuringiensis serovar londrina; Bacillus thuringiensis serovar malayensis; Bacillus thuringiensis serovar medellin; Bacillus thuringiensis serovar mexicanensis; Bacillus thuringiensis serovar mogi; Bacillus thuringiensis serovar monterrey; Bacillus thuringiensis serovar morrisoni; Bacillus thuringiensis serovar muju; Bacillus thuringiensis serovar navarrensis; Bacillus thuringiensis serovar neoleonensis; Bacillus thuringiensis serovar nigeriensis; Bacillus thuringiensis serovar novosibirsk; Bacillus thuringiensis serovar ostriniae; Bacillus thuringiensis serovar oswaldocruzi; Bacillus thuringiensis serovar pahangi; Bacillus thuringiensis serovar pakistani; Bacillus thuringiensis serovar palmanyolensis; Bacillus thuringiensis serovar pingluonsis; Bacillus thuringiensis serovar pirenaica; Bacillus thuringiensis serovar poloniensis; Bacillus thuringiensis serovar pondicheriensis; Bacillus thuringiensis serovar pulsiensis; Bacillus thuringiensis serovar rongseni; Bacillus thuringiensis serovar roskildiensis; Bacillus thuringiensis serovar san diego; Bacillus thuringiensis serovar seoulensis; Bacillus thuringiensis serovar shandongiensis; Bacillus thuringiensis serovar silo; Bacillus thuringiensis serovar sinensis; Bacillus thuringiensis serovar sooncheon; Bacillus thuringiensis serovar sotto; Bacillus thuringiensis serovar sotto/dendrolimus; Bacillus thuringiensis serovar subtoxicus; Bacillus thuringiensis serovar sumiyoshiensis; Bacillus thuringiensis serovar sylvestriensis; Bacillus thuringiensis serovar tenebrionis; Bacillus thuringiensis serovar thailandensis; Bacillus thuringiensis serovar thompsoni; Bacillus thuringiensis serovar thuringiensis; Bacillus thuringiensis serovar tochigiensis; Bacillus thuringiensis serovar toguchini; Bacillus thuringiensis serovar tohokuensis; Bacillus thuringiensis serovar tolworthi; Bacillus thuringiensis serovar toumanoffi; Bacillus thuringiensis serovar vazensis; Bacillus thuringiensis serovar wratislaviensis; Bacillus thuringiensis serovar wuhanensis; Bacillus thuringiensis serovar xiaguangiensis; Bacillus thuringiensis serovar yosoo; Bacillus thuringiensis serovar yunnanensis; Bacillus thuringiensis serovar zhaodongensis; Bacillus thuringiensis str. Al Hakam; Bacillus thuringiensis T01-328; Bacillus thuringiensis YBT-1518; and Bacillus thuringiensis serovar konkukian.

[0811] In some preferred embodiments, an IA can be a one of the following organisms: Bacillus thuringiensis var. israelensis, Bacillus thuringiensis var. aizawai, Bacillus thuringiensis var. kurstaki, or Bacillus thuringiensis var. tenebrionensis.

[0812] In some embodiments, an IA can be a protein isolated from Bacillus thuringiensis. For example, in some embodiments, the IA can be a toxin isolated from Bacillus thuringiensis var. israelensis, Bacillus thuringiensis var. aizawai, Bacillus thuringiensis var. kurstaki, or Bacillus thuringiensis var. tenebrionensis.

[0813] In some embodiments, an IA can be a MTX2 toxin, e.g., a MTX2 toxin isolated from Lysinibacillus sphaericus.

[0814] In some embodiments, an IA can be a Bin-like toxin, e.g., a Bin-like toxin isolated from Lysinibacillus sphaericus.

[0815] In some embodiments, an IA can be a Bacillus thuringiensis var. israelensis (Bti) toxin.

[0816] In some embodiments, an IA can be a Bacillus thuringiensis ssp. israelensis Strain BMP 144 Bti toxin.

[0817] In some embodiments, an IA can be a Bacillus thuringiensis var. kurstaki (Btk) toxin.

[0818] In some embodiments, an IA can be a Bacillus thuringiensis ssp. kurstaki strain EVB-113-19 Btk toxin.

[0819] In some embodiments, an IA can be a Bacillus thuringiensis var. tenebrionis (Btt) toxin.

[0820] In some embodiments, an IA can be a Bacillus thuringiensis ssp. tenebrionis strain NB-176 Btt toxin.

[0821] In some embodiments, the IA isolated from a Bacillus thuringiensis can be contained in a commercially available product. For example, in some embodiments, the commercially available product comprising an IA can be AQUABAC XT® from Becker Microbial Products, Inc.; NOVODOR® FC from VALENT® U.S.A. LLC Agricultural Products; and/or BioProtec Plus™ from AEF Global Inc.

[0822] In some embodiments, an IA can be one or more Bacillus thuringiensis ssp. kurstaki strain EVB-113-19 cells.

[0823] In some embodiments, an IA can be one or more fermentation solids, spores, and/or insecticidal toxins isolated from Bacillus thuringiensis ssp. kurstaki strain EVB-113-19 cells.

[0824] In some embodiments, an IA can be one or more Bacillus thuringiensis ssp. tenebrionis strain NB-176 cells.

[0825] In some embodiments, an IA can be one or more fermentation solids, spores, and/or insecticidal toxins isolated from Bacillus thuringiensis ssp. tenebrionis strain NB-176 cells.

[0826] In some embodiments, an IA can be one or more Bacillus thuringiensis ssp. israelensis Strain BMP 144 cells.

[0827] In some embodiments, an IA can be one or more fermentation solids, spores, and/or insecticidal toxins isolated from Bacillus thuringiensis ssp. israelensis Strain BMP 144 cells.

[0828] In some embodiments, an IA can be AQUABAC XT®, consisting of the following ingredients: 6-10% (˜8%) Bacillus thuringiensis ssp. israelensis Strain BMP 144 solids, spores & insecticidal toxins, wherein said insecticidal toxins are δ-endotoxins, and equivalent to 1,200 International Toxic Units (ITU/mg) (4.84 Billion ITU/gallon or 1.2 Billion ITU/Liter); and ˜92% other/inactive ingredients.

[0829] In some embodiments, an IA can be NOVODOR® FC (or flowable concentrate), consisting of 10% Bacillus thuringiensis ssp. tenebrionis strain NB-176 fermentation solids and solubles, with a potency of 15,000 Leptinotarsa Units (LTU) per gram of product (equivalent to 16.3 Million LTU's per quart of product); and 90% other/inactive ingredients.

[0830] In some embodiments, an IA can be BioProtec Plus™, consisting of 14.49% Bacillus thuringiensis ssp. kurstaki strain EVB-113-19 fermentation solids, spores, and insecticidal toxins with a potency of 17,500 Cabbage Looper Units (CLU) per mg of product (equivalent to 76 billion CLU per gallon of product); and 85.51% other/inactive ingredients.

[0831] In some embodiments, an IA can be a Bt toxin, wherein said Bt toxin is a 6-endotoxin (e.g., a Crystal (Cry) toxin and/or a cytolytic (Cyt) toxin); a vegetative insecticidal protein (Vip); a secreted insecticidal protein (Sip); or a Bin-like toxin.

[0832] In some embodiments, an IA can be a Bt toxin having amino acid sequence as set forth in any one of SEQ ID NOs: 412-587.

[0833] In some embodiments, an IA can be a Cry protein having amino acid sequence as set forth in any one of SEQ ID NOs: 412-461.

[0834] In some embodiments, an IA can be a Cyt protein having amino acid sequence as set forth in any one of SEQ ID NOs: 462-481.

[0835] In some embodiments, an IA can be a Vip having amino acid sequence as set forth in any one of SEQ ID NOs: 482-587.

[0836] In some embodiments, an IA can be one or more of the following Cry proteins: Cry1Aa1, Cry1Aa2, Cry1Aa3, Cry1Aa4, Cry1Aa5, Cry1Aa6, Cry1Aa7, Cry1Aa8, Cry1Aa9, Cry1Aa10, Cry1Aa11, Cry1Aa12, Cry1Aa13, Cry1Aa14, Cry1Aa15, Cry1Aa16, Cry1Aa17, Cry1Aa18, Cry1Aa19, Cry1Aa20, Cry1Aa21, Cry1Aa22, Cry1Aa23, Cry1Aa24, Cry1Aa25, Cry1Ab1, Cry1Ab2, Cry1Ab3, Cry1Ab4, Cry1Ab5, Cry1Ab6, Cry1Ab7, Cry1Ab8, Cry1Ab9, Cry1Ab10, Cry1Ab11, Cry1Ab12, Cry1Ab13, Cry1Ab14, Cry1Ab15, Cry1Ab16, Cry1Ab17, Cry1Ab18, Cry1Ab19, Cry1Ab20, Cry1Ab21, Cry1Ab22, Cry1Ab23, Cry1Ab24, Cry1Ab25, Cry1Ab26, Cry1Ab27, Cry1Ab28, Cry1Ab29, Cry1Ab30, Cry1Ab31, Cry1Ab32, Cry1Ab33, Cry1Ab34, Cry1Ab35, Cry1Ab36, Cry1Ab-like, Cry1Ab-like, Cry1Ab-like, Cry1Ab-like, Cry1Ac1, Cry1Ac2, Cry1Ac3, Cry1Ac4, Cry1Ac5, Cry1Ac6, Cry1Ac7, Cry1Ac8, Cry1Ac9, Cry1Ac10, Cry1Ac11, Cry1Ac12, Cry1Ac13, Cry1Ac14, Cry1Ac15, Cry1Ac16, Cry1Ac17, Cry1Ac18, Cry1Ac19, Cry1Ac20, Cry1Ac21, Cry1Ac22, Cry1Ac23, Cry1Ac24, Cry1Ac25, Cry1Ac26, Cry1Ac27, Cry1Ac28, Cry1Ac29, Cry1Ac30, Cry1Ac31, Cry1Ac32, Cry1Ac33, Cry1Ac34, Cry1Ac35, Cry1Ac36, Cry1Ac37, Cry1Ac38, Cry1Ac39, Cry1Ad1, Cry1Ad2, Cry1Ae1, Cry1Af1, Cry1Ag1, Cry1Ah1, Cry1Ah2, Cry1Ah3, Cry1Ai1, Cry1Ai2, Cry1Aj1, Cry1A-like, Cry1Ba1, Cry1Ba2, Cry1Ba3, Cry1Ba4, Cry1Ba5, Cry1Ba6, Cry1Ba7, Cry1Ba8, Cry1Bb1, Cry1Bb2, Cry1Bb3, Cry1Bc1, Cry1Bd1, Cry1Bd2, Cry1Bd3, Cry1Be1, Cry1Be2, Cry1Be3, Cry1Be4, Cry1Be5, Cry1Bf1, Cry1Bf2, Cry1Bg1, Cry1Bh1, Cry1Bi1, Cry1Bj1, Cry1Ca1, Cry1Ca2, Cry1Ca3, Cry1Ca4, Cry1Ca5, Cry1Ca6, Cry1Ca7, Cry1Ca8, Cry1Ca9, Cry1Ca10, Cry1Ca11, Cry1Ca12, Cry1Ca13, Cry1Ca14, Cry1Ca15, Cry1Cb1, Cry1Cb2, Cry1Cb3, Cry1Cb-like, Cry1Da1, Cry1Da2, Cry1Da3, Cry1Da4, Cry1Da5, Cry1db1, Cry1db2, Cry1Dc1, Cry1Dd1, Cry1Ea1, Cry1Ea2, Cry1Ea3, Cry1Ea4, Cry1Ea5, Cry1Ea6, Cry1Ea7, Cry1Ea8, Cry1Ea9, Cry1Ea10, Cry1Ea11, Cry1Ea12, Cry1Eb1, Cry1Fa1, Cry1Fa2, Cry1Fa3, Cry1Fa4, Cry1Fb1, Cry1Fb2, Cry1Fb3, Cry1Fb4, Cry1Fb5, Cry1Fb6, Cry1Fb7, Cry1Ga1, Cry1Ga2, Cry1Gb1, Cry1Gb2, Cry1Gc1, Cry1Ha1, Cry1Hb1, Cry1Hb2, Cry1Hc1, Cry1H-like, Cry1Ia1, Cry1Ia2, Cry1Ia3, Cry1Ia4, Cry1Ia5, Cry1Ia6, Cry1Ia7, Cry1Ia8, Cry1Ia9, Cry1Ia10, Cry1Ia11, Cry1Ia12, Cry1Ia13, Cry1Ia14, Cry1Ia15, Cry1Ia16, Cry1Ia17, Cry1Ia18, Cry1Ia19, Cry1Ia20, Cry1Ia21, Cry1Ia22, Cry1Ia23, Cry1Ia24, Cry1Ia25, Cry1Ia26, Cry1Ia27, Cry1Ia28, Cry1Ia29, Cry1Ia30, Cry1Ia31, Cry1Ia32, Cry1Ia33, Cry1Ia34, Cry1Ia35, Cry1Ia36, Cry1Ia37, Cry1Ia38, Cry1Ia39, Cry1Ia40, Cry1Ib1, Cry1Ib2, Cry1Ib3, Cry1Ib4, Cry1Ib5, Cry1Ib6, Cry1Ib7, Cry1Ib8, Cry1Ib9, Cry1Ib10, Cry1Ib11, Cry1Ic1, Cry1Ic2, Cry1Id1, Cry1Id2, Cry1Id3, Cry1Ie1, Cry1Ie2, Cry1Ie3, Cry1Ie4, Cry1Ie5, Cry1If1, Cry1Ig1, Cry1I-like, Cry1I-like, Cry1Ja1, Cry1Ja2, Cry1Ja3, Cry1Jb1, Cry1Jc1, Cry1Jc2, Cry1Jd1, Cry1Ka1, Cry1Ka2, Cry1La1, Cry1La2, Cry1La3, Cry1Ma1, Cry1Ma2, Cry1Na1, Cry1Na2, Cry1Na3, Cry1Nb1, Cry1-like, Cry2Aa1, Cry2Aa2, Cry2Aa3, Cry2Aa4, Cry2Aa5, Cry2Aa6, Cry2Aa7, Cry2Aa8, Cry2Aa9, Cry2Aa10, Cry2Aa11, Cry2Aa12, Cry2Aa13, Cry2Aa14, Cry2Aa15, Cry2Aa16, Cry2Aa17, Cry2Aa18, Cry2Aa19, Cry2Aa20, Cry2Aa21, Cry2Aa22, Cry2Aa23, Cry2Aa23, Cry2Aa25, Cry2Ab1, Cry2Ab2, Cry2Ab3, Cry2Ab4, Cry2Ab5, Cry2Ab6, Cry2Ab7, Cry2Ab8, Cry2Ab9, Cry2Ab10, Cry2Ab11, Cry2Ab12, Cry2Ab13, Cry2Ab14, Cry2Ab15, Cry2Ab16, Cry2Ab17, Cry2Ab18, Cry2Ab19, Cry2Ab20, Cry2Ab21, Cry2Ab22, Cry2Ab23, Cry2Ab24, Cry2Ab25, Cry2Ab26, Cry2Ab27, Cry2Ab28, Cry2Ab29, Cry2Ab30, Cry2Ab31, Cry2Ab32, Cry2Ab33, Cry2Ab34, Cry2Ab35, Cry2Ab36, Cry2Ac1, Cry2Ac2, Cry2Ac3, Cry2Ac4, Cry2Ac5, Cry2Ac6, Cry2Ac7, Cry2Ac8, Cry2Ac9, Cry2Ac10, Cry2Ac11, Cry2Ac12, Cry2Ad1, Cry2Ad2, Cry2Ad3, Cry2Ad4, Cry2Ad5, Cry2Ae1, Cry2Af1, Cry2Af2, Cry2Ag1, Cry2Ah1, Cry2Ah2, Cry2Ah3, Cry2Ah4, Cry2Ah5, Cry2Ah6, Cry2Ai1, Cry2Aj1, Cry2Ak1, Cry2A11, Cry2Ba1, Cry2Ba2, Cry3Aa1, Cry3Aa2, Cry3Aa3, Cry3Aa4, Cry3Aa5, Cry3Aa6, Cry3Aa7, Cry3Aa8, Cry3Aa9, Cry3Aa10, Cry3Aa11, Cry3Aa12, Cry3Ba1, Cry3Ba2, Cry3Ba3, Cry3Bb1, Cry3Bb2, Cry3Bb3, Cry3Ca1, Cry4Aa1, Cry4Aa2, Cry4Aa3, Cry4Aa4, Cry4A-like, Cry4Ba1, Cry4Ba2, Cry4Ba3, Cry4Ba4, Cry4Ba5, Cry4Ba-like, Cry4Ca1, Cry4Ca2, Cry4Cb1, Cry4Cb2, Cry4Cb3, Cry4Cc1, Cry5Aa1, Cry5Ab1, Cry5Ac1, Cry5Ad1, Cry5Ba1, Cry5Ba2, Cry5Ba3, Cry5Ca1, Cry5Ca2, Cry5Da1, Cry5Da2, Cry5Ea1, Cry5Ea2, Cry6Aa1, Cry6Aa2, Cry6Aa3, Cry6Ba1, Cry7Aa1, Cry7Aa2, Cry7Ab1, Cry7Ab2, Cry7Ab3, Cry7Ab4, Cry7Ab5, Cry7Ab6, Cry7Ab7, Cry7Ab8, Cry7Ab9, Cry7Ac1, Cry7Ba1, Cry7Bb1, Cry7Ca1, Cry7Cb1, Cry7Da1, Cry7Da2, Cry7Da3, Cry7Ea1, Cry7Ea2, Cry7Ea3, Cry7Fa1, Cry7Fa2, Cry7Fb1, Cry7Fb2, Cry7Fb3, Cry7Ga1, Cry7Ga2, Cry7Gb1, Cry7Gc1, Cry7Gd1, Cry7Ha1, Cry7Ia1, Cry7Ja1, Cry7Ka1, Cry7Kb1, Cry7La1, Cry8Aa1, Cry8Ab1, Cry8Ac1, Cry8Ad1, Cry8Ba1, Cry8Bb1, Cry8Bc1, Cry8Ca1, Cry8Ca2, Cry8Ca3, Cry8Ca4, Cry8Ca5, Cry8Da1, Cry8Da2, Cry8Da3, Cry8db1, Cry8Ea1, Cry8Ea2, Cry8Ea3, Cry8Ea4, Cry8Ea5, Cry8Ea6, Cry8Fa1, Cry8Fa2, Cry8Fa3, Cry8Fa4, Cry8Ga1, Cry8Ga2, Cry8Ga3, Cry8Ha1, Cry8Hb1, Cry8Ia1, Cry8Ia2, Cry8Ia3, Cry8Ia4, Cry8Ib1, Cry8Ib2, Cry8Ib3, Cry8Ja1, Cry8Ka1, Cry8Ka2, Cry8Ka3, Cry8Kb1, Cry8Kb2, Cry8Kb3, Cry8La1, Cry8Ma1, Cry8Ma2, Cry8Ma3, Cry8Na1, Cry8Pa1, Cry8Pa2, Cry8Pa3, Cry8Qa1, Cry8Qa2, Cry8Ra1, Cry8Sa1, Cry8Ta1, Cry8-like, Cry8-like, Cry9Aa1, Cry9Aa2, Cry9Aa3, Cry9Aa4, Cry9Aa5, Cry9Aa, like, Cry9Ba1, Cry9Ba2, Cry9Bb1, Cry9Ca1, Cry9Ca2, Cry9Cb1, Cry9Da1, Cry9Da2, Cry9Da3, Cry9Da4, Cry9db1, Cry9Dc1, Cry9Ea1, Cry9Ea2, Cry9Ea3, Cry9Ea4, Cry9Ea5, Cry9Ea6, Cry9Ea7, Cry9Ea8, Cry9Ea9, Cry9Ea10, Cry9Ea11, Cry9Eb1, Cry9Eb2, Cry9Eb3, Cry9Ec1, Cry9Ed1, Cry9Ee1, Cry9Ee2, Cry9Fa1, Cry9Ga1, Cry9-like, Cry10Aa1, Cry10Aa2, Cry10Aa3, Cry10Aa4, Cry10A-like, Cry11Aa1, Cry11Aa2, Cry11Aa3, Cry11Aa4, Cry11Aa5, Cry11Aa-like, Cry11Ba1, Cry11Bb1, Cry11Bb2, Cry12Aa1, Cry13Aa1, Cry13Aa2, Cry14Aa1, Cry14Ab1, Cry15Aa1, Cry16Aa1, Cry17Aa1, Cry18Aa1, Cry18Ba1, Cry18Ca1, Cry19Aa1, Cry19Ba1, Cry19Ca1, Cry20Aa1, Cry20Ba1, Cry20Ba2, Cry20-like, Cry21Aa1, Cry21Aa2, Cry21Aa3, Cry21Ba1, Cry21Ca1, Cry21Ca2, Cry21Da1, Cry21Ea1, Cry21Fa1, Cry21Ga1, Cry21Ha1, Cry22Aa1, Cry22Aa2, Cry22Aa3, Cry22Ab1, Cry22Ab2, Cry22Ba1, Cry22Bb1, Cry23Aa1, Cry24Aa1, Cry24Ba1, Cry24Ca1, Cry24Da1, Cry25Aa1, Cry26Aa1, Cry27Aa1, Cry28Aa1, Cry28Aa2, Cry29Aa1, Cry29Ba1, Cry30Aa1, Cry30Ba1, Cry30Ca1, Cry30Ca2, Cry30Da1, Cry30db1, Cry30Ea1, Cry30Ea2, Cry30Ea3, Cry30Ea4, Cry30Fa1, Cry30Ga1, Cry30Ga2, Cry31Aa1, Cry31Aa2, Cry31Aa3, Cry31Aa4, Cry31Aa5, Cry31Aa6, Cry31Ab1, Cry31Ab2, Cry31Ac1, Cry31Ac2, Cry31Ad1, Cry31Ad2, Cry32Aa1, Cry32Aa2, Cry32Ab1, Cry32Ba1, Cry32Ca1, Cry32Cb1, Cry32Da1, Cry32Ea1, Cry32Ea2, Cry32Eb1, Cry32Fa1, Cry32Ga1, Cry32Ha1, Cry32Hb1, Cry32Ia1, Cry32Ja1, Cry32Ka1, Cry32La1, Cry32Ma1, Cry32Mb1, Cry32Na1, Cry32Oa1, Cry32Pa1, Cry32Qa1, Cry32Ra1, Cry32Sa1, Cry32Ta1, Cry32Ua1, Cry32Va1, Cry32Wa1, Cry32Wa2, Cry32Xa1, Cry32Ya1, Cry33Aa1, Cry34Aa1, Cry34Aa2, Cry34Aa3, Cry34Aa4, Cry34Ab1, Cry34Ac1, Cry34Ac2, Cry34Ac3, Cry34Ba1, Cry34Ba2, Cry34Ba3, Cry35Aa1, Cry35Aa2, Cry35Aa3, Cry35Aa4, Cry35Ab1, Cry35Ab2, Cry35Ab3, Cry35Ac1, Cry35Ba1, Cry35Ba2, Cry35Ba3, Cry36Aa1, Cry37Aa1, Cry38Aa1, Cry39Aa1, Cry40Aa1, Cry40Ba1, Cry40Ca1, Cry40Da1, Cry41Aa1, Cry41Ab1, Cry41Ba1, Cry41Ba2, Cry41Ca1, Cry42Aa1, Cry43Aa1, Cry43Aa2, Cry43Ba1, Cry43Ca1, Cry43Cb1, Cry43Cc1, Cry43-like, Cry44Aa1, Cry45Aa1, Cry45Ba1, Cry46Aa1, Cry46Aa2, Cry46Ab1, Cry47Aa1, Cry48Aa1, Cry48Aa2, Cry48Aa3, Cry48Ab1, Cry48Ab2, Cry49Aa1, Cry49Aa2, Cry49Aa3, Cry49Aa4, Cry49Ab1, Cry50Aa1, Cry50Ba1, Cry50Ba2, Cry51Aa1, Cry51Aa2, Cry52Aa1, Cry52Ba1, Cry52Ca1, Cry53Aa1, Cry53Ab1, Cry54Aa1, Cry54Aa2, Cry54Ab1, Cry54Ba1, Cry54Ba2, Cry55Aa1, Cry55Aa2, Cry55Aa3, Cry56Aa1, Cry56Aa2, Cry56Aa3, Cry56Aa4, Cry57Aa1, Cry57Ab1, Cry58Aa1, Cry59Ba1, Cry59Aa1, Cry60Aa1, Cry60Aa2, Cry60Aa3, Cry60Ba1, Cry60Ba2, Cry60Ba3, Cry61Aa1, Cry61Aa2, Cry61Aa3, Cry62Aa1, Cry63Aa1, Cry64Aa1, Cry64Ba1, Cry64Ca1, Cry65Aa1, Cry65Aa2, Cry66Aa1, Cry66Aa2, Cry67Aa1, Cry67Aa2, Cry68Aa1, Cry69Aa1, Cry69Aa2, Cry69Ab1, Cry70Aa1, Cry70Ba1, Cry70Bb1, Cry71Aa1, Cry72Aa1, Cry72Aa2, Cry73Aa1, Cry74Aa, Cry75Aa1, Cry75Aa2, Cry75Aa3, Cry76Aa1, Cry77Aa1, and/or Cry78Aa1.

[0837] In some embodiments, an IA can be any of the Cry toxins as described herein, or presented in Table 7.

TABLE 7
Non-limiting examples of Cry toxins, their accession numbers
on NCBI, and strain. Here, if a cell is left blank, then the
accession number and/or strain is not applicable.

| Name | NCBI Accession No. | Strain/Other ID |
|---|---|---|
| Cry1Aa1 | AAA22353 | Bt kurstaki HD1 |
| Cry1Aa2 | AAA22552 | Bt sotto |
| Cry1Aa3 | BAA00257 | Bt aizawai IPL7 |
| Cry1Aa4 | CAA31886 | Bt entomocidus |
| Cry1Aa5 | BAA04468 | Bt Fu-2-7 |
| Cry1Aa6 | AAA86265 | Bt kurstaki NRD-12 |
| Cry1Aa7 | AAD46139 | Bt C12 |
| Cry1Aa8 | I26149 | |
| Cry1Aa9 | BAA77213 | Bt dendrolimus T84A1 |
| Cry1Aa10 | AAD55382 | Bt kurstaki HD-1-02 |
| Cry1Aa11 | CAA70856 | Bt kurstaki |
| Cry1Aa12 | AAP80146 | Bt Ly30 |
| Cry1Aa13 | AAM44305 | Bt sotto |
| Cry1Aa14 | AAP40639 | unpublished |
| Cry1Aa15 | AAY66993 | Bt INTA Mol-12 |
| Cry1Aa16 | HQ439776 | Bt Ps9-E2 |
| Cry1Aa17 | HQ439788 | Bt PS9-C12 |
| Cry1Aa18 | HQ439790 | Bt PS9-D12 |
| Cry1Aa19 | HQ685121 | Bt LS-R-21 |
| Cry1Aa20 | JF340156 | Bt SK-798 |
| Cry1Aa21 | JN651496 | Bt LTS-209 |
| Cry1Aa22 | KC158223 | Bt Lip |
| Cry1Aa23 | KJ125392 | Bt |
| Cry1Aa24 | AGH68331 | Btk NAIMCC-B-00167 |
| Cry1Aa25 | MK391629 | Bt MPUB5 |
| Cry1Ab1 | AAA22330 | Bt berliner 1715 |
| Cry1Ab2 | AAA22613 | Bt kurstaki |
| Cry1Ab3 | AAA22561 | Bt kurstaki HD1 |
| Cry1Ab4 | BAA00071 | Bt kurstaki HD1 |
| Cry1Ab5 | CAA28405 | Bt berliner 1715 |
| Cry1Ab6 | AAA22420 | Bt kurstaki NRD-12 |
| Cry1Ab7 | CAA31620 | Bt aizawai IC1 |
| Cry1Ab8 | AAA22551 | Bt aizawai IPL7 |
| Cry1Ab9 | CAA38701 | Bt aizawai HD133 |
| Cry1Ab10 | A29125 | Bt kurstaki HD1 |
| Cry1Ab11 | I12419 | Bt A20 |
| Cry1Ab12 | AAC64003 | Bt kurstaki S93 |
| Cry1Ab13 | AAN76494 | Bt c005 |
| Cry1Ab14 | AAG16877 | Native Chilean Bt |
| Cry1Ab15 | AAO13302 | Bt B-Hm-16 |
| Cry1Ab16 | AAK55546 | Bt AC-11 |
| Cry1Ab17 | AAT46415 | Bt WB9 |
| Cry1Ab18 | AAQ88259 | Bt |
| Cry1Ab19 | AAW31761 | Bt X-2 |
| Cry1Ab20 | ABB72460 | BtC008 |
| Cry1Ab21 | ABS18384 | Bt IS5056 |
| Cry1Ab22 | ABW87320 | BtS2491Ab |
| Cry1Ab23 | HQ439777 | Bt N32-2-2 |
| Cry1Ab24 | HQ439778 | Bt HD12 |
| Cry1Ab25 | HQ685122 | Bt LS-R-30 |
| Cry1Ab26 | HQ847729 | DOR BT-1 |
| Cry1Ab27 | JN135249 | |
| Cry1Ab28 | JN135250 | |
| Cry1Ab29 | JN135251 | |
| Cry1Ab30 | JN135252 | |
| Cry1Ab31 | JN135253 | |
| Cry1Ab32 | JN135254 | |
| Cry1Ab33 | AAS93798 | Bt kenyae K3 |
| Cry1Ab34 | KC156668 | ARP102 |
| Cry1Ab35 | KT692985 | Bt GS36 |
| Cry1Ab36 | KY440260 | Bt NEAU B-X5 |
| Cry1Ab-like | AAK14336 | Bt kunthala RX24 |
| Cry1Ab-like | AAK14337 | Bt kunthala RX28 |
| Cry1Ab-like | AAK14338 | Bt kunthala RX27 |
| Cry1Ab-like | ABG88858 | Bt ly4a3 |
| Cry1Ac1 | AAA22331 | Bt kurstaki HD73 |
| Cry1Ac2 | AAA22338 | Bt kenyae |
| Cry1Ac3 | CAA38098 | Bt BTS89A |
| Cry1Ac4 | AAA73077 | Bt kurstaki PS85A1 |
| Cry1Ac5 | AAA22339 | Bt kurstaki PS81GG |
| Cry1Ac6 | AAA86266 | Bt kurstaki NRD-12 |
| Cry1Ac7 | AAB46989 | Bt kurstaki HD73 |
| Cry1Ac8 | AAC44841 | Bt kurstaki HD73 |
| Cry1Ac9 | AAB49768 | Bt DSIR732 |
| Cry1Ac10 | CAA05505 | Bt kurstaki YBT-1520 |
| Cry1Ac11 | CAA10270 | |
| Cry1Ac12 | I12418 | Bt A20 |
| Cry1Ac13 | AAD38701 | Bt kurstaki HD1 |
| Cry1Ac14 | AAQ06607 | Bt Ly30 |
| Cry1Ac15 | AAN07788 | Bt from Taiwan |
| Cry1Ac16 | AAU87037 | Bt H3 |
| Cry1Ac17 | AAX18704 | Bt kenyae HD549 |
| Cry1Ac18 | AAY88347 | Bt SK-729 |
| Cry1Ac19 | ABD37053 | Bt C-33 |
| Cry1Ac20 | ABB89046 | |
| Cry1Ac21 | AAY66992 | INTA Mol-12 |
| Cry1Ac22 | ABZ01836 | Bt W015-1 |
| Cry1Ac23 | CAQ30431 | Bt |
| Cry1Ac24 | ABL01535 | Bt 146-158-01 |
| Cry1Ac25 | FJ513324 | Bt Tm37-6 |
| Cry1Ac26 | FJ617446 | Bt Tm41-4 |
| Cry1Ac27 | FJ617447 | Bt Tm44-1B |
| Cry1Ac28 | ACM90319 | Bt Q-12 |
| Cry1Ac29 | DQ438941 | INTA TA24-6 |
| Cry1Ac30 | GQ227507 | Bt S1478-1 |
| Cry1Ac31 | GU446674 | Bt S3299-1 |
| Cry1Ac32 | HM061081 | Bt ZQ-89 |
| Cry1Ac33 | GQ866913 | Bt SK-711 |
| Cry1Ac34 | HQ230364 | Bt SK-783 |
| Cry1Ac35 | JF340157 | Bt SK-784 |
| Cry1Ac36 | JN387137 | Bt SK-958 |
| Cry1Ac37 | JQ317685 | Bt SK-793 |
| Cry1Ac38 | ACC86135 | Bt LSZ9408 |
| Cry1Ac39 | ALT07695 | LBIT1200 |
| Cry1Ad1 | AAA22340 | Bt aizawai PS81I |
| Cry1Ad2 | CAA01880 | Bt PS81RR1 |
| CrylAe1 | AAA22410 | Bt alesti |
| Cry1Af1 | AAB82749 | Bt NT0423 |
| Cry1Ag1 | AAD46137 | |
| Cry1Ah1 | AAQ14326 | |
| Cry1Ah2 | ABB76664 | Bt alesti |
| Cry1Ah3 | HQ439779 | Bt S6 |
| Cry1Ai1 | AA039719 | |
| Cry1Ai2 | HQ439780 | Bt SC6H8 |
| Cry1Aj1 | KJ28846 | |
| Cry1A-like | AAK14339 | Bt kunthala nags3 |
| Cry1Ba1 | CAA29898 | Bt thuringiensis HD2 |
| Cry1Ba2 | CAA65003 | Bt entomocidus HD110 |
| Cry1Ba3 | AAK63251 | |
| Cry1Ba4 | AAK51084 | Bt entomocidus HD9 |
| Cry1Ba5 | ABO20894 | Bt sfw-12 |
| Cry1Ba6 | ABL60921 | Bt S601 |
| Cry1Ba7 | HQ439781 | Bt N17-37 |
| Cry1Ba8 | KJ868173 | Bt Na205-3 |
| Cry1Bb1 | AAA22344 | Bt EG5847 |
| Cry1Bb2 | HQ439782 | Bt WBT-2 |
| Cry1Bb3 | KJ619659 | Bt FH21 |
| Cry1Bc1 | CAA86568 | Bt morrisoni |
| Cry1Bd1 | AAD10292 | Bt wuhanensis HD525 |
| Cry1Bd2 | AAM93496 | Bt 834 |
| Cry1Bd3 | KX398132 | Bt K4 |
| Cry1Be1 | AAC32850 | Bt PS158C2 |
| Cry1Be2 | AAQ52387 | |
| Cry1Be3 | ACV96720 | Bt g9 |
| Cry1Be4 | HM070026 | |
| Cry1Be5 | KU761578 | Bt LBR2 |
| Cry1Bf1 | CAC50778 | |
| Cry1Bf2 | AAQ52380 | |
| Cry1Bg1 | AA039720 | |
| Cry1Bh1 | HQ589331 | Bt PS46L |
| Cry1Bi1 | KC156700 | ARP260 |
| Cry1Bj1 | KT952325 | Bt |
| Cry1Ca1 | CAA30396 | Bt entomocidus 60.5 |
| Cry1Ca2 | CAA31951 | Bt aizawai 7.29 |
| Cry1Ca3 | AAA22343 | Bt aizawai PS81I |
| Cry 1Ca4 | CAA01886 | Bt entomocidus HD110 |
| Cry1Ca5 | CAA65457 | Bt aizawai 7.29 |
| Cry1Ca6 [1] | AAF37224 | Bt AF-2 |
| Cry1Ca7 | AAG50438 | Bt J8 |
| Cry1Ca8 | AAM00264 | Bt c002 |
| Cry1Ca9 | AAL79362 | Bt G10-01A |
| Cry1Ca10 | AAN16462 | Bt E05-20a |
| Cry1Ca11 | AAX53094 | Bt C-33 |
| Cry1Ca12 | HM070027 | mo3-E7 |
| Cry1Ca13 | HQ412621 | Bt LB-R-78 |
| Cry1Ca14 | JN651493 | Bt LTS-38 |
| Cry1Ca15 | MK391630 | Bt MPU B5 |
| Cry1Cb1 | M97880 | Bt galleriae HD29 |
| Cry1Cb2 | AAG35409 | Bt c001 |
| Cry1Cb3 | ACD50894 | Bt 087 |
| Cry1Cb-like | AAX63901 | Bt TA476-1 |
| Cry1Da1 | CAA38099 | Bt aizawai HD68 |
| Cry1Da2 | I76415 | |
| Cry1Da3 | HQ439784 | Bt HD12 |
| Cry1Da4 | KJ619660 | Bt FH21 |
| Cry1Da5 | MG181949 | QL75-2 |
| Cry1Db1 | CAA80234 | Bt BTS00349A |
| Cry1Db2 | AAK48937 | Bt B-Pr-88 |
| Cry1Dc1 | ABK35074 | Bt JC291 |
| Cry1Dd1 | KJ28844 | |
| Cry1Ea1 | CAA37933 | Bt kenyae 4F1 |
| Cry1Ea2 | CAA39609 | Bt kenyae |
| Cry1Ea3 | AAA22345 | Bt kenyae PS81F |
| Cry1Ea4 | AAD04732 | Bt kenyae LBIT-147 |
| Cry1Ea5 | A15535 | |
| Cry1Ea6 | AAL50330 | Bt YBT-032 |
| Cry1Ea7 | AAW72936 | Bt JC190 |
| Cry1Ea8 | ABX11258 | Bt HZM2 |
| Cry1Ea9 | HQ439785 | Bt S6 |
| Cry1Ea10 | ADR00398 | Bt BR64 |
| Cry1Ea11 | JQ652456 | Bt |
| Cry1Ea12 | KF601559 | Bt strain V4 |
| Cry1Eb1 | AAA22346 | Bt aizawai PS81A2 |
| Cry1Fa1 | AAA22348 | Bt aizawai EG6346 |
| Cry1Fa2 | AAA22347 | Bt aizawai PS81I |
| Cry1Fa3 | HM070028 | Bt mo3-D8 |
| Cry1Fa4 | HM439638 | Bt mo3-D10 |
| Cry1Fb1 | CAA80235 | Bt BTS00349A |
| Cry1Fb2 | BAA25298 | Bt morrisoni INA67 |
| Cry1Fb3 | AAF21767 | Bt morrisoni |
| Cry1Fb4 | AAC10641 | |
| Cry1Fb5 | AAO13295 | Bt B-Pr-88 |
| Cry1Fb6 | ACD50892 | Bt 012 |
| Cry1Fb7 | ACD50893 | Bt 087 |
| Cry1Ga1 | CAA80233 | Bt BTS0349A |
| Cry1Ga2 | CAA70506 | Bt wuhanensis |
| Cry1Gb1 | AAD10291 | Bt wuhanensis HD525 |
| Cry1Gb2 | AAO13756 | Bt B-Pr-88 |
| Cry1Gc1 | AAQ52381 | |
| Cry1Ha1 | CAA80236 | Bt BTS02069AA |
| Cry1Hb1 | AAA79694 | Bt morrisoni BF190 |
| Cry1Hb2 | HQ439786 | Bt WBT-2 |
| Cry1Hc1 | KJ28845 | |
| Cry1H-like | AAF01213 | Bt JC291 |
| Cry1Ia1 | CAA44633 | Bt kurstaki |
| Cry1Ia2 | AAA22354 | Bt kurstaki |
| Cry1Ia3 | AAC36999 | Bt kurstaki HD1 |
| Cry1Ia4 | AAB00958 | Bt AB88 |
| Cry1Ia5 | CAA70124 | Bt 61 |
| Cry1Ia6 | AAC26910 | Bt kurstaki S101 |
| Cry1Ia7 | AAM73516 | Bt |
| Cry1Ia8 | AAK66742 | |
| Cry1Ia9 | AAQ08616 | Bt Ly30 |
| Cry1Ia10 | AAP86782 | Bt thuringiensis |
| Cry1Ia11 | CAC85964 | Bt kurstaki BNS3 |
| Cry1Ia12 | AAV53390 | Bt |
| Cry1Ia13 | ABF83202 | Bt |
| Cry1Ia14 | ACG63871 | Bt11 |
| Cry1Ia15 | FJ617445 | Bt E-1B |
| Cry1Ia16 | FJ617448 | Bt E-1A |
| Cry1Ia17 | GU989199 | Bt MX2 |
| Cry1Ia18 | ADK23801 | Bt MX9 |
| Cry1Ia19 | HQ439787 | Bt SC6H6 |
| Cry1Ia20 | JQ228426 | Bt wu1H-3 |
| Cry1Ia21 | JQ228424 | Bt you1D-9 |
| Cry1Ia22 | JQ228427 | Bt wu1E-3 |
| Cry1Ia23 | JQ228428 | Bt wu1E-4 |
| Cry1Ia24 | JQ228429 | Bt wu2B-6 |
| Cry1Ia25 | JQ228430 | Bt wu2G-11 |
| Cry1Ia26 | JQ228431 | Bt wu2G-12 |
| Cry1Ia27 | JQ228432 | Bt you2D-3 |
| Cry1Ia28 | JQ228433 | Bt you2E-3 |
| Cry1Ia29 | JQ228434 | Bt you2F-3 |
| Cry1Ia30 | JQ317686 | Bt 4J4 |
| Cry1Ia31 | JX944038 | Bt SC-7 |
| Cry1Ia32 | JX944039 | Bt SC-13 |
| Cry1Ia33 | JX944040 | Bt SC-51 |
| Cry1Ia34 | KJ868171 | Bt Na205-3 |
| Cry1Ia35 | AIF79803 | Bt V4 |
| Cry1Ia36 | KY212747 | Bt YC-10 |
| Cry1Ia37 | MG674828 | Bt SY80 |
| Cry1Ia38 | MG584186 | |
| Cry1Ia39 | MK393238 | Bt INTA H4-3 |
| Cry1Ia40 | MK391631 | Bt MPU B9 |
| Cry1Ib1 | AAA82114 | Bt entomocidus BP465 |
| Cry1Ib2 | ABW88019 | Bt PP61 |
| Cry1Ib3 | ACD75515 | Bt GS8 |
| Cry1Ib4 | HM051227 | Bt BF-4 |
| Cry1Ib5 | HM070028 | Bt mo3-D8 |
| Cry1Ib6 | ADK38579 | Bt LB52 |
| Cry1Ib7 | JN571740 | Bt SK-935 |
| Cry1Ib8 | JN675714 | |
| Cry1Ib9 | JN675715 | |
| Cry1Ib10 | JN675716 | |
| Cry1Ib11 | JQ228423 | Bt HD12 |
| CrylIc1 | AAC62933 | Bt C18 |
| Cry1Ic2 | AAE71691 | |
| Cry1Id1 | AAD44366 | |
| Cry1Id2 | JQ228422 | Bt HD12 |
| Cry1Id3 | KJ619661 | Bt FH21 |
| Cry1Ie1 | AAG43526 | Bt BTC007 |
| Cry1Ie2 | HM439636 | Bt T03B001 |
| Cry1Ie3 | KC156647 | ARP058 |
| Cry1Ie4 | KC156681 | ARP131 |
| Cry1Ie5 | KJ710646 | BN23-5 |
| Cry1If1 | AAQ52382 | |
| Cry1Ig1 | KC156701 | ARP166 |
| Cry1I-like | AAC31094 | |
| Cry1I-like | ABG88859 | Bt ly4a3 |
| Cry1Ja1 | AAA22341 | Bt EG5847 |
| Cry1Ja2 | HM070030 | WBT-1 |
| Cry1Ja3 | JQ228425 | Bt FH21 |
| Cry1Jb1 | AAA98959 | Bt EG5092 |
| Cry1Jc1 | AAC31092 | |
| Cry1Jc2 | AAQ52372 | |
| Cry1Jd1 | CAC50779 | Bt |
| Cry1Ka1 | AAB00376 | Bt morrisoni BF190 |
| Cry1Ka2 | HQ439783 | Bt WBT-2 |
| Cry1La1 | AAS60191 | Bt kurstaki K1 |
| Cry1La2 | HM070031 | Bt SC6H8 |
| Cry1La3 | KT692983 | Bt GS27 |
| Cry1Ma1 | FJ884067 | LBIT 1189 |
| Cry1Ma2 | KC156659 | ARP080 |
| Cry1Na1 | KC156648 | ARP009 |
| Cry1Na2 | AEH31422 | Bt T03B001 |
| Cry1Na3 | AKQ08661 | Bt BRC-ZYR2 |
| Cry1Nb1 | KC156678 | ARP146 |
| Cry1-like | AAC31091 | |
| Cry2Aa1 | AAA22335 | Bt kurstaki |
| Cry2Aa2 | AAA83516 | Bt kurstaki HD1 |
| Cry2Aa3 | D86064 | Bt sotto |
| Cry2Aa4 | AAC04867 | Bt kenyae HD549 |
| Cry2Aa5 | CAA10671 | Bt SL39 |
| Cry2Aa6 | CAA10672 | Bt YZ71 |
| Cry2Aa7 | CAA10670 | Bt CY29 |
| Cry2Aa8 | AAO13734 | Bt Dongbei 66 |
| Cry2Aa9 | AAO13750 | |
| Cry2Aa10 | AAQ04263 | |
| Cry2Aa11 | AAQ52384 | |
| Cry2Aa12 | ABI83671 | Bt Rpp39 |
| Cry2Aa13 | ABL01536 | Bt 146-158-01 |
| Cry2Aa14 | ACF04939 | Bt HD-550 |
| Cry2Aa15 | JN426947 | Bt SSy77 |
| Cry2Aa16 | KF667522 | Bt V4 |
| Cry2Aa17 | KF860848 | |
| Cry2Aa18 | ANF99565 | Bt SY49.1 |
| Cry2Aa19 | MG983752 | Bt-T32 |
| Cry2Aa20 | MG983753 | Bt-T405 |
| Cry2Aa21 | MG983754 | Bt-T414 |
| Cry2Aa22 | MH475904 | Bt-T527 |
| Cry2Aa23 | MH475905 | Bt-T532 |
| Cry2Aa23 | MH475906 | Bt-T536 |
| Cry2Aa25 | MH475907 | Bt-T543 |
| Cry2Ab1 | AAA22342 | Bt kurstaki HD1 |
| Cry2Ab2 | CAA39075 | Bt kurstaki HD1 |
| Cry2Ab3 | AAG36762 | Bt BTC002 |
| Cry2Ab4 | AAO13296 | Bt B-Pr-88 |
| Cry2Ab5 | AAQ04609 | Bt ly30 |
| Cry2Ab6 | AAP59457 | Bt WZ-7 |
| Cry2Ab7 | AAZ66347 | Bt 14-1 |
| Cry2Ab8 | ABC95996 | Bt WB2 |
| Cry2Ab9 | ABC74968 | Bt LLB6 |
| Cry2Ab10 | ABM21766 | Bt LyL |
| Cry2Ab11 | CAM84575 | Bt CMBL-BT1 |
| Cry2Ab12 | ABM21764 | Bt LyD |
| Cry2Ab13 | ACG76120 | Bt ywc5-4 |
| Cry2Ab14 | ACG76121 | Bt Bts |
| Cry2Ab15 | HM037126 | Bt BF-4 |
| Cry2Ab16 | GQ866914 | SK-793 |
| Cry2Ab17 | HQ439789 | Bt PS9-C12 |
| Cry2Ab18 | JN135255 | |
| Cry2Ab19 | JN135256 | |
| Cry2Ab20 | JN135257 | |
| Cry2Ab21 | JN135258 | |
| Cry2Ab22 | JN135259 | |
| Cry2Ab23 | JN135260 | |
| Cry2Ab24 | JN135261 | |
| Cry2Ab25 | JN415485 | Btk MnD |
| Cry2Ab26 | JN426946 | Bt SSy77 |
| Cry2Ab27 | JN415764 | |
| Cry2Ab28 | JN651494 | Bt LTS-7 |
| Cry2Ab29 | KF860847 | |
| Cry2Ab30 | EU623976 | Bt LSZ9408 |
| Cry2Ab31 | AHM93475 | Bt HTS-S-38 |
| Cry2Ab32 | KJ710647 | BN23-5 |
| Cry2Ab33 | KP053646 | Bt CYZ-4 |
| Cry2Ab34 | KX236449 | Bt BJH406 |
| Cry2Ab35 | KY212748 | Bt YC-10 |
| Cry2Ab36 | MK391632 | MPU B5 |
| Cry2Ac1 | CAA40536 | Bt shanghai S1 |
| Cry2Ac2 | AAG35410 | |
| Cry2Ac3 | AAQ52385 | |
| Cry2Ac4 | ABC95997 | Bt WB9 |
| Cry2Ac5 | ABC74969 | |
| Cry2Ac6 | ABC74793 | Bt wuhanensis |
| Cry2Ac7 | CAL18690 | Bt SBSBT-1 |
| Cry2Ac8 | CAM09325 | Bt CMBL-BT1 |
| Cry2Ac9 | CAM09326 | Bt CMBL-BT2 |
| Cry2Ac10 | ABN15104 | Bt QCL-1 |
| Cry2Ac11 | CAM83895 | Bt HD29 |
| Cry2Ac12 | CAM83896 | Bt CMBL-BT3 |
| Cry2Ad1 | AAF09583 | Bt BR30 |
| Cry2Ad2 | ABC86927 | Bt WB10 |
| Cry2Ad3 | CAK29504 | Bt 5_2AcT(1) |
| Cry2Ad4 | CAM32331 | Bt CMBL-BT2 |
| Cry2Ad5 | CAO78739 | Bt HD29 |
| Cry2Ae1 | AAQ52362 | |
| Cry2Af1 | ABO30519 | Bt C81 |
| Cry2Af2 | GQ866915 | SK-758 |
| Cry2Ag1 | ACH91610 | Bt JF19-2 |
| Cry2Ah1 | EU939453 | Bt SC6H8 |
| Cry2Ah2 | ACL80665 | Bt BRC-ZQL3 |
| Cry2Ah3 | GU073380 | HYW-8 |
| Cry2Ah4 | KC156702 | ARP193 |
| Cry2Ah5 | KT692984 | Bt GS3 |
| Cry2Ah6 | KX034204 | |
| Cry2Ai1 | FJ788388 | Bt |
| Cry2Aj1 | | |
| Cry2Ak1 | KC156660 | ARP067 |
| Cry2Al1 | KJ149819 | Bt SWK1 |
| Cry2Ba1 | KC156658 | ARP026 |
| Cry2Ba2 | KF014123 | HD395 |
| Cry3Aa1 | AAA22336 | Bt san diego |
| Cry3Aa2 | AAA22541 | Bt tenebrionis |
| Cry3Aa3 | CAA68482 | |
| Cry3Aa4 | AAA22542 | Bt tenebrionis |
| Cry3Aa5 | AAA50255 | Bt morrisoni EG2158 |
| Cry3Aa6 | AAC43266 | Bt tenebrionis |
| Cry3Aa7 | CAB41411 | Bt 22 |
| Cry3Aa8 | AAS79487 | Bt YM-03 |
| Cry3Aa9 | AAW05659 | Bt UTD-001 |
| Cry3Aa10 | AAU29411 | Bt 886 |
| Cry3Aa11 | AAW82872 | Bt tenebrionis Mm2 |
| Cry3Aa12 | ABY49136 | Bt tenebrionis |
| Cry3Ba1 | CAA34983 | Bt tolworthi 43F |
| Cry3Ba2 | CAA00645 | Bt PGSI208 |
| Cry3Ba3 | JQ397327 | Bt ML090 |
| Cry3Bb1 | AAA22334 | Bt EG4961 |
| Cry3Bb2 | AAA74198 | Bt EG5144 |
| Cry3Bb3 | I15475 | |
| Cry3Ca1 | CAA42469 | Bt kurstaki BtI109P |
| Cry4Aa1 | CAA68485 | Bt israelensis |
| Cry4Aa2 | BAA00179 | Bt israelensis HD522 |
| Cry4Aa3 | CAD30148 | Bt israelensis |
| Cry4Aa4 | AFB18317 | Bti BRC-LLP29 |
| Cry4A-like | AAY96321 | Bt LDC-9 |
| Cry4Ba1 | CAA30312 | Bt israelensis 4Q2-72 |
| Cry4Ba2 | CAA30114 | Bt israelensis |
| Cry4Ba3 | AAA22337 | Bt israelensis |
| Cry4Ba4 | BAA00178 | Bt israelensis HD522 |
| Cry4Ba5 | CAD30095 | Bt israelensis |
| Cry4Ba-like | ABC47686 | Bt LDC-9 |
| Cry4Ca1 | EU646202 | Bt Y41 |
| Cry4Ca2 | KM053252 | Bt SK700 |
| Cry4Cb1 | FJ403208 | Bt HS18-1 |
| Cry4Cb2 | FJ597622 | Bt Ywc2-8 |
| Cry4Cb3 | AHG25301 | Bt S2160-1 |
| Cry4Cc1 | FJ403207 | Bt MC28 |
| Cry5Aa1 | AAA67694 | Bt darmstadiensis PS17 |
| Cry5Ab1 | AAA67693 | Bt darmstadiensis PS17 |
| Cry5Ac1 | I34543 | |
| Cry5Ad1 | ABQ82087 | Bt L366 |
| Cry5Ba1 | AAA68598 | Bt PS86Q3 |
| Cry5Ba2 | ABW88931 | YBT 1518 |
| Cry5Ba3 | AFJ04417 | Bt zjfc85 |
| Cry5Ca1 | HM461869 | Sbt003 |
| Cry5Ca2 | ZP_04123426 | Bt T13001 |
| Cry5Da1 | HM461870 | Sbt003 |
| Cry5Da2 | ZP_04123980 | Bt T13001 |
| Cry5Ea1 | HM485580 | Sbt003 |
| Cry5Ea2 | ZP_04124038 | Bt T13001 |
| Cry6Aa1 | AAA22357 | Bt PS52A1 |
| Cry6Aa2 | AAM46849 | YBT 1518 |
| Cry6Aa3 | ABH03377 | Bt 96418 |
| Cry6Ba1 | AAA22358 | Bt PS69D1 |
| Cry7Aa1 | AAA22351 | Bt galleriae PGSI245 |
| Cry7Aa2 | MK840959 | Bt BM311.1 |
| Cry7Ab1 | AAA21120 | Bt dakota HD511 |
| Cry7Ab2 | AAA21121 | Bt kumamotoensis 867 |
| Cry7Ab3 | ABX24522 | Bt WZ-9 |
| Cry7Ab4 | EU380678 | Bt HQ122 |
| Cry7Ab5 | ABX79555 | Bt monterrey GM-33 |
| Cry7Ab6 | ACI44005 | Bt HQ122 |
| Cry7Ab7 | ADB89216 | Bt GW6 |
| Cry7Ab8 | GU145299 | |
| Cry7Ab9 | ADD92572 | Bt QG-121 |
| Cry7Ac1 | KJ789922 | Bt QZL20-1 |
| Cry7Ba1 | ABB70817 | Bt huazhongensis |
| Cry7Bb1 | KC156653 | ARP013 |
| Cry7Ca1 | ABR67863 | Bt BTH-13 |
| Cry7Cb1 | KC156698 | ARP269 |
| Cry7Da1 | ACQ99547 | Bt LH-2 |
| Cry7Da2 | HM572236 | |
| Cry7Da3 | KC156679 | ARP140 |
| Cry7Ea1 | HM035086 | Sbt009 |
| Cry7Ea2 | HM132124 | HD868(D8) |
| Cry7Ea3 | EEM19403 | BGSC 4Y1 |
| Cry7Fa1 | HM035088 | SBt009 |
| Cry7Fa2 | EEM19090 | BGSC 4Y1 |
| Cry7Fb1 | HM572235 | Bt |
| Cry7Fb2 | KC156682 | ARP162 |
| Cry7Fb3 | HM572235 | |
| Cry7Ga1 | HM572237 | Bt |
| Cry7Ga2 | KC156669 | ARP103 |
| Cry7Gb1 | KC156650 | ARP011 |
| Cry7Gc1 | KC156654 | ARP012 |
| Cry7Gd1 | KC156697 | ARP271 |
| Cry7Ha1 | KC156651 | ARP021 |
| Cry7Ia1 | KC156665 | ARP112 |
| Cry7Ja1 | KC156671 | ARP114 |
| Cry7Ka1 | KC156680 | ARP171 |
| Cry7Kb1 | BAM99306 | Bt dakota |
| Cry7La1 | BAM99307 | Bt dakota |
| Cry8Aa1 | AAA21117 | Bt kumamotoensis |
| Cry8Ab1 | EU044830 | Bt B-JJX |
| Cry8Ac1 | KC156662 | ARP068 |
| Cry8Ad1 | KC156684 | ARP215 |
| Cry8Ba1 | AAA21118 | Bt kumamotoensis |
| Cry8Bb1 | CAD57542 | |
| Cry8Bc1 | CAD57543 | |
| Cry8Ca1 | AAA21119 | Bt japonensis Buibui |
| Cry8Ca2 | AAR98783 | Bt HBF-1 |
| Cry8Ca3 | EU625349 | Bt FTL-23 |
| Cry8Ca4 | ADB54826 | Bt S185 |
| Cry8Ca5 | MK167020 | Bt BJH500 |
| Cry8Da1 | BAC07226 | Bt galleriae |
| Cry8Da2 | BD133574 | Bt |
| Cry8Da3 | BD133575 | Bt |
| Cry8Db1 | BAF93483 | Bt BBT2-5 |
| Cry8Ea1 | AAQ73470 | Bt 185 |
| Cry8Ea2 | EU047597 | Bt B-DLL |
| Cry8Ea3 | KC855216 | Bt GWL |
| Cry8Ea4 | AGM16383 | QZL144-1 |
| Cry8Ea5 | AGM16384 | QZL144-4 |
| Cry8Ea6 | KT692742 | ZK1 |
| Cry8Fa1 | AAT48690 | Bt 185 |
| Cry8Fa2 | HQ174208 | Bt DLL |
| Cry8Fa3 | AFH78109 | Bt L-27 |
| Cry8Fa4 | AGM16382 | QHW7-2 |
| Cry8Ga1 | AAT46073 | Bt HBF-18 |
| Cry8Ga2 | ABC42043 | Bt 145 |
| Cry8Ga3 | FJ198072 | Bt FCD114 |
| Cry8Ha1 | AAW81032 | Bt 185 |
| Cry8Hb1 | KP713881 | Bt |
| Cry8Ia1 | EU381044 | Bt su4 |
| Cry8Ia2 | GU073381 | Bt HW-11 |
| Cry8Ia3 | HM044664 | Sbt030 |
| Cry8Ia4 | KC156674 | ARP124 |
| Cry8Ib1 | GU325772 | Bt F4 |
| Cry8Ib2 | KC156677 | ARP135 |
| Cry8Ib3 | AHG25076 | Bt TS3 |
| Cry8Ja1 | EU625348 | Bt FPT-2 |
| Cry8Ka1 | FJ422558 | |
| Cry8Ka2 | ACN87262 | Bt kenyae |
| Cry8Ka3 | AGM16381 | QHW7-2 |
| Cry8Kb1 | HM123758 | ST8 |
| Cry8Kb2 | KC156675 | ARP158 |
| Cry8Kb3 | KJ123823 | INTA Fr7-4 |
| Cry8La1 | GU325771 | Bt F4 |
| Cry8Ma1 | | Sbt016 |
| Cry8Ma2 | EEM86551 | BGSC 4CC1 |
| Cry8Ma3 | HM210574 | NARC Bt17 (C6) |
| Cry8Na1 | HM640939 | BtQ52-7 |
| Cry8Pa1 | HQ388415 | Bt ST8 |
| Cry8Pa2 | HQ413324 | Bt QCM(T1) |
| Cry8Pa3 | KJ123823 | INTA Fr7-4 |
| Cry8Qa1 | HQ441166 | Bt ST8 |
| Cry8Qa2 | KC152468 | Bt INTA Fr7-4 |
| Cry8Ra1 | AFP87548 | Bt R36 |
| Cry8Sa1 | JQ740599 | Bt Strain 62 |
| Cry8Ta1 | KC156673 | ARP110 |
| Cry8-like | FJ770571 | Bt canadensis |
| Cry8-like | ABS53003 | Bt |
| Cry9Aa1 | CAA41122 | Bt galleriae |
| Cry9Aa2 | CAA41425 | Bt DSIR517 |
| Cry9Aa3 | GQ249293 | Bt SC5(D2) |
| Cry9Aa4 | GQ249294 | Bt T03C001 |
| Cry9Aa5 | JX174110 | BGSN1 |
| Cry9Aa like | AAQ52376 | |
| Cry9Ba1 | CAA52927 | Bt galleriae |
| Cry9Ba2 | GU299522 | Bt B-SC5 |
| Cry9Bb1 | AAV28716 | Bt japonensis |
| Cry9Ca1 | CAA85764 | Bt tolworthi |
| Cry9Ca2 | AAQ52375 | |
| Cry9Cb1 | MK005301 | |
| Cry9Da1 | BAA19948 | Bt japonensis N141 |
| Cry9Da2 | AAB97923 | Bt japonensis |
| Cry9Da3 | GQ249293 | Bt SC5 (D2) |
| Cry9Da4 | GQ249297 | Bt T03B001 |
| Cry9Db1 | AAX78439 | Bt kurstaki DP1019 |
| Cry9Dc1 | KC156683 | ARP168 |
| Cry9Ea1 | BAA34908 | Bt aizawai SSK-10 |
| Cry9Ea2 | AAO12908 | Bt B-Hm-16 |
| Cry9Ea3 | ABM21765 | Bt lyA |
| Cry9Ea4 | ACE88267 | Bt ywc5-4 |
| Cry9Ea5 | ACF04743 | Bts |
| Cry9Ea6 | ACG63872 | Bt 11 |
| Cry9Ea7 | FJ380927 | Bt 4 |
| Cry9Ea8 | GQ249292 | Bt SC5(E8) |
| Cry9Ea9 | JN651495 | Bt LTS-7 |
| Cry9Ea10 | KT692743 | ZK2 |
| Cry9Ea11 | MK391633 | Bt MPU B9 |
| Cry9Eb1 | CAC50780 | |
| Cry9Eb2 | GQ249298 | Bt T23001 |
| Cry9Eb3 | KC156646 | ARP057 |
| Cry9Ec1 | AAC63366 | Bt galleriae |
| Cry9Ed1 | AAX78440 | Bt kurstaki DP1019 |
| Cry9Ee1 | GQ249296 | Bt T03B001 |
| Cry9Ee2 | KC156664 | ARP095 |
| Cry9Fa1 | KC156692 | ARP212 |
| Cry9Ga1 | KC156699 | ARP188 |
| Cry9-like | AAC63366 | Bt galleriae |
| Cry10Aa1 | AAA22614 | Bt israelensis |
| Cry10Aa2 | E00614 | Bt israelensis ONR-60A |
| Cry10Aa3 | CAD30098 | Bt israelensis |
| Cry10Aa4 | AFB18318 | Bti BRC-LLP29 |
| Cry10A-like | DQ167578 | Bt LDC-9 |
| Cry11Aa1 | AAA22352 | Bt israelensis |
| Cry11Aa2 | AAA22611 | Bt israelensis |
| Cry11Aa3 | CAD30081 | Bt israelensis |
| Cry11Aa4 | AFB18319 | Bti BRC-LLP29 |
| Cry11Aa5 | MH253686 | |
| Cry11Aa-like | DQ166531 | Bt LDC-9 |
| Cry11Ba1 | CAA60504 | Bt jegathesan 367 |
| Cry11Bb1 | AAC97162 | Bt medellin |
| Cry11Bb2 | HM068615 | Bt K34 |
| Cry12Aa1 | AAA22355 | Bt PS33F2 |
| Cry13Aa1 | AAA22356 | Bt PS63B |
| Cry13Aa2 | CP015350 | Bt MYBT18246 |
| Cry14Aa1 | AAA21516 | Bt sotto PS80JJ1 |
| Cry14Ab1 | KC156652 | ARP001 |
| Cry15Aa1 | AAA22333 | Bt thompsoni |
| Cry16Aa1 | CAA63860 | Cb malaysia CH18 |
| Cry17Aa1 | CAA67841 | Cb malaysia CH18 |
| Cry18Aa1 | CAA67506 | Paenibacillus popilliae |
| Cry18Ba1 | AAF89667 | Paenibacillus popilliae |
| Cry18Ca1 | AAF89668 | Paenibacillus popilliae |
| Cry19Aa1 | CAA68875 | Bt jegathesan 367 |
| Cry19Ba1 | BAA32397 | Bt higo |
| Cry19Ca1 | AFM37572 | BGSC 4CE1 |
| Cry20Aa1 | AAB93476 | Bt fukuokaensis |
| Cry20Ba1 | ACS93601 | Bt higo LBIT-976 |
| Cry20Ba2 | KC156694 | ARP192 |
| Cry20-like | GQ144333 | Bt Y-5 |
| Cry21Aa1 | I32932 | |
| Cry21Aa2 | I66477 | |
| Cry21Aa3 | MF893204 | |
| Cry21Ba1 | BAC06484 | Bt roskildiensis |
| Cry21Ca1 | JF521577 | |
| Cry21Ca2 | KC156687 | ARP258 |
| Cry21Da1 | JF521578 | Sbt072 |
| Cry21Ea1 | KC865049 | |
| Cry21Fa1 | KF701307 | DB27 |
| Cry21Ga1 | KF771885 | DB27 |
| Cry21Ha1 | KF771886 | DB27 |
| Cry22Aa1 | I34547 | |
| Cry22Aa2 | CAD43579 | Bt |
| Cry22Aa3 | ACD93211 | Bt FZ-4 |
| Cry22Ab1 | AAK50456 | Bt EG4140 |
| Cry22Ab2 | CAD43577 | Bt |
| Cry22Ba1 | CAD43578 | Bt |
| Cry22Bb1 | KC156672 | ARP148 |
| Cry23Aa1 | AAF76375 | Bt |
| Cry24Aa1 | AAC61891 | Bt jegathesan |
| Cry24Ba1 | BAD32657 | Bt sotto |
| Cry24Ca1 | CAJ43600 | Bt FCC-41 |
| Cry24Da1 | KJ439561 | BLB32 |
| Cry25Aa1 | AAC61892 | Bt jegathesan |
| Cry26Aa1 | AAD25075 | Bt finitimus B-1166 |
| Cry27Aa1 | BAA82796 | Bt higo |
| Cry28Aa1 | AAD24189 | Bt finitimus B-1161 |
| Cry28Aa2 | AAG00235 | Bt finitimus |
| Cry29Aa1 | CAC80985 | Bt medellin |
| Cry29Ba1 | KC865046 | |
| Cry30Aa1 | CAC80986 | Bt medellin |
| Cry30Ba1 | BAD00052 | Bt entomocidus |
| Cry30Ca1 | BAD67157 | Bt sotto |
| Cry30Ca2 | ACU24781 | Bt jegathesan 367 |
| Cry30Da1 | EF095955 | Bt Y41 |
| Cry30Db1 | BAE80088 | Bt aizawai BUN1-14 |
| Cry30Ea1 | ACC95445 | Bt S2160-1 |
| Cry30Ea2 | FJ499389 | Bt Ywc2-8 |
| Cry30Ea3 | FJ527836 | Bt Hs18-1 |
| Cry30Ea4 | KJ740649 | BN15-6 |
| Cry30Fa1 | ACI22625 | Bt MC28 |
| Cry30Ga1 | ACG60020 | Bt HS18-1 |
| Cry30Ga2 | HQ638217 | Bt S2160-1 |
| Cry31Aa1 | BAB11757 | Bt 84-HS-1-11 |
| Cry31Aa2 | AAL87458 | Bt M15 |
| Cry31Aa3 | BAE79808 | Bt B0195 |
| Cry31Aa4 | BAF32571 | Bt 79-25 |
| Cry31Aa5 | BAF32572 | Bt 92-10 |
| Cry31Aa6 | BAI44026 | M019 |
| Cry31Ab1 | BAE79809 | Bt B0195 |
| Cry31Ab2 | BAF32570 | Bt 31-5 |
| Cry31Ac1 | BAF34368 | Bt 87-29 |
| Cry31Ac2 | AB731600 | Bt B0462 |
| Cry31Ad1 | BAI44022 | Bt MO19 |
| Cry31Ad2 | AGO57767 | Bt 64-1-94 |
| Cry32Aa1 | AAG36711 | Bt yunnanensis |
| Cry32Aa2 | GU063849 | Bt FBG-1 |
| Cry32Ab1 | GU063850 | Bt FZ-2 |
| Cry32Ba1 | BAB78601 | Bt |
| Cry32Ca1 | BAB78602 | Bt |
| Cry32Cb1 | KC156708 | ARP227 |
| Cry32Da1 | BAB78603 | Bt |
| Cry32Ea1 | GU324274 | Bt HYD-3 |
| Cry32Ea2 | KC156686 | ARP239 |
| Cry32Eb1 | KC156663 | ARP092 |
| Cry32Fa1 | KC156656 | ARP055 |
| Cry32Ga1 | KC156657 | ARP052 |
| Cry32Ha1 | KC156661 | ARP076 |
| Cry32Hb1 | KC156666 | ARP096 |
| Cry32Ia1 | KC156667 | ARP104 |
| Cry32Ja1 | KC156685 | ARP262 |
| Cry32Ka1 | KC156688 | ARP259 |
| Cry32La1 | KC156689 | ARP203 |
| Cry32Ma1 | KC156690 | ARP256 |
| Cry32Mb1 | KC156704 | ARP242 |
| Cry32Na1 | KC156691 | ARP179 |
| Cry32Oa1 | KC156703 | ARP218 |
| Cry32Pa1 | KC156705 | ARP277 |
| Cry32Qa1 | KC156706 | ARP174 |
| Cry32Ra1 | KC156707 | ARP229 |
| Cry32Sa1 | KC156709 | ARP185 |
| Cry32Ta1 | KC156710 | ARP220 |
| Cry32Ua1 | KC156655 | ARP050 |
| Cry32Va1 | | LM1212 |
| Cry32Wa1 | | LM1212 |
| Cry32Wa2 | AHN52957 | Bt B3 |
| Cry32Xa1 | KX094974 | |
| Cry32Ya1 | KX094973 | |
| Cry33Aa1 | AAL26871 | Bt dakota |
| Cry34Aa1 | AAG50341 | Bt PS80JJ1 |
| Cry34Aa2 | AAK64560 | Bt EG5899 |
| Cry34Aa3 | AAT29032 | Bt PS69Q |
| Cry34Aa4 | AAT29030 | Bt PS185GG |
| Cry34Ab1 | AAG41671 | Bt PS149B1 |
| Cry34Ac1 | AAG50118 | Bt PS167H2 |
| Cry34Ac2 | AAK64562 | Bt EG9444 |
| Cry34Ac3 | AAT29029 | Bt KR1369 |
| Cry34Ba1 | AAK64565 | Bt EG4851 |
| Cry34Ba2 | AAT29033 | Bt PS201L3 |
| Cry34Ba3 | AAT29031 | Bt PS201HH2 |
| Cry35Aa1 | AAG50342 | Bt PS80JJ1 |
| Cry35Aa2 | AAK64561 | Bt EG5899 |
| Cry35Aa3 | AAT29028 | Bt PS69Q |
| Cry35Aa4 | AAT29025 | Bt PS185GG |
| Cry35Ab1 | AAG41672 | Bt PS149B1 |
| Cry35Ab2 | AAK64563 | Bt EG9444 |
| Cry35Ab3 | AY536891 | Bt KR1369 |
| Cry35Ac1 | AAG50117 | Bt PS167H2 |
| Cry35Ba1 | AAK64566 | Bt EG4851 |
| Cry35Ba2 | AAT29027 | Bt PS201L3 |
| Cry35Ba3 | AAT29026 | Bt PS201HH2 |
| Cry36Aa1 | AAK64558 | Bt |
| Cry37Aa1 | AAF76376 | Bt |
| Cry38Aa1 | AAK64559 | Bt |
| Cry39Aa1 | BAB72016 | Bt aizawai |
| Cry40Aa1 | BAB72018 | Bt aizawai |
| Cry40Ba1 | BAC77648 | Bun1-14 |
| Cry40Ca1 | EU381045 | Bt Y41 |
| Cry40Da1 | ACF15199 | Bt S2096-2 |
| Cry41Aa1 | BAD35157 | Bt A1462 |
| Cry41Ab1 | BAD35163 | Bt A1462 |
| Cry41Ba1 | HM461871 | Sbt021 |
| Cry41Ba2 | ZP_04099652 | BGSC 4AW1 |
| Cry41Ca1 | | LM1212 |
| Cry42Aa1 | BAD35166 | Bt A1462 |
| Cry43Aa1 | BAD15301 | P. lentimorbus semadara |
| Cry43Aa2 | BAD95474 | P. popilliae popilliae |
| Cry43Ba1 | BAD15303 | P. lentimorbus semadara |
| Cry43Ca1 | KC156676 | ARP132 |
| Cry43Cb1 | KC156695 | ARP252 |
| Cry43Cc1 | KC156696 | ARP191 |
| Cry43-like | BAD15305 | P. lentimorbus semadara |
| Cry44Aa1 | BAD08532 | Bt entomocidus INA288 |
| Cry45Aa1 | BAD22577 | Bt 89-T-34-22 |
| Cry45Ba1 | | LM1212 |
| Cry46Aa1 | BAC79010 | Bt dakota |
| Cry46Aa2 | BAG68906 | Bt A1470 |
| Cry46Ab1 | BAD35170 | Bt |
| Cry47Aa1 | AAY24695 | Bt CAA890 |
| Cry48Aa1 | CAJ18351 | Bs IAB59 |
| Cry48Aa2 | CAJ86545 | Bs 47-6B |
| Cry48Aa3 | CAJ86546 | Bs NHA15b |
| Cry48Ab1 | CAJ86548 | Bs LP1G |
| Cry48Ab2 | CAJ86549 | Bs 2173 |
| Cry49Aa1 | CAH56541 | Bs IAB59 |
| Cry49Aa2 | CAJ86541 | Bs 47-6B |
| Cry49Aa3 | CAJ86543 | BsNHA15b |
| Cry49Aa4 | CAJ86544 | Bs 2173 |
| Cry49Ab1 | CAJ86542 | Bs LP1G |
| Cry50Aa1 | BAE86999 | Bt sotto |
| Cry50Ba1 | GU446675 | Bt S2160-1 |
| Cry50Ba2 | GU446676 | Bt S3161-3 |
| Cry51Aa1 | ABI14444 | Bt F14-1 |
| Cry51Aa2 | GU570697 | EG2934 |
| Cry52Aa1 | EF613489 | Bt Y41 |
| Cry52Ba1 | FJ361760 | Bt BM59-2 |
| Cry52Ca1 | KM053253 | Bt SK700 |
| Cry53Aa1 | EF633476 | Bt Y41 |
| Cry53Ab1 | FJ361759 | Bt MC28 |
| Cry54Aa1 | ACA52194 | Bt MC28 |
| Cry54Aa2 | GQ140349 | Bt FBG25 |
| Cry54Ab1 | JQ916908 | Bt MC28 |
| Cry54Ba1 | GU446677 | Bt S2160-1 |
| Cry54Ba2 | KJ740650 | BN15-6 |
| Cry55Aa1 | ABW88932 | YBT 1518 |
| Cry55Aa2 | AAE33526 | Bt Y41 |
| Cry55Aa3 | HG764207 | Bt T44 |
| Cry56Aa1 | ACU57499 | Bt Ywc2-8 |
| Cry56Aa2 | GQ483512 | Bt G7-1 |
| Cry56Aa3 | JX025567 | Bt HS18-1 |
| Cry56Aa4 | KJ740651 | BN7-5 |
| Cry57Aa1 | ACN87261 | Bt kim |
| Cry57Ab1 | KF638650 | Bt LTS290 |
| Cry58Aa1 | ACN87260 | Bt entomocidus |
| Cry59Ba1 | JN790647 | Bt Bm59-2 |
| Cry59Aa1 | ACR43758 | Bt kim LBIT-980 |
| Cry60Aa1 | ACU24782 | Bt jegathesan |
| Cry60Aa2 | EAO57254 | Bt israelensis |
| Cry60Aa3 | EEM99278 | Bt IBL 4222 |
| Cry60Ba1 | GU810818 | Bt malayensis |
| Cry60Ba2 | EAO57253 | Bt israelensis |
| Cry60Ba3 | EEM99279 | Bt IBL 4222 |
| Cry61Aa1 | HM035087 | Sbt009 |
| Cry61Aa2 | HM132125 | HD868 (E5) |
| Cry61Aa3 | EEM19308 | BGSC 4Y1 |
| Cry62Aa1 | HM054509 | ST7 |
| Cry63Aa1 | BAI44028 | MO19 |
| Cry64Aa1 | BAJ05397 | Bt tohokuensis |
| Cry64Ba1 | AGT29559 | BT 210-8-45 |
| Cry64Ca1 | AGT29560 | BT 210-8-45 |
| Cry65Aa1 | HM461868 | SBt 003 |
| Cry65Aa2 | ZP_04123838 | T13001 |
| Cry66Aa1 | AEB52311 | SBt 021 |
| Cry66Aa2 | ZP 04099945 | BGSC 4AW1 |
| Cry67Aa1 | HM485582 | SBt 009 |
| Cry67Aa2 | ZP_04148882 | BGSC 4Y1 |
| Cry68Aa1 | HQ113114 | Bt MC28 |
| Cry69Aa1 | HQ401006 | Bt MC28 |
| Cry69Aa2 | JQ821388 | Bt MC28 |
| Cry69Ab1 | JN209957 | Bt hs18-1 |
| Cry70Aa1 | JN646781 | Bt hs18-1 |
| Cry70Ba1 | ADO51070 | Bt MC28 |
| Cry70Bb1 | EEL67276 | Bc AH603 |
| Cry71Aa1 | JX025568 | Bt Hs18-1 |
| Cry72Aa1 | JX025569 | Bt Hs18-1 |
| Cry72Aa2 | KX094975 | |
| Cry73Aa1 | AEH76822 | Sbt Sbt029 |
| Cry74Aa | | LM1212 |
| Cry75Aa1 | ASY04853 | Bl EG5553 |
| Cry75Aa2 | ASY04852 | Bl EG5551 |
| Cry75Aa3 | ASY04851 | Bl EG5552 |
| Cry76Aa1 | MH810248 | |
| Cry77Aa1 | MH810249 | |
| Cry78Aa1 | KY780623 | Bt C9F1 |

[0838] In some embodiments, an IA can be one or more of the following Cyt proteins: Cyt1Aa1, Cyt1Aa2, Cyt1Aa3, Cyt1Aa4, Cyt1Aa5, Cyt1Aa6, Cyt1Aa7, Cyt1Aa8, Cyt1Aa-like, Cyt1Ab1, Cyt1Ba1, Cyt1Ca1, Cyt1Da1, Cyt1Da2, Cyt2Aa1, Cyt2Aa2, Cyt2Aa3, Cyt2Aa4, Cyt2Ba1, Cyt2Ba2, Cyt2Ba3, Cyt2Ba4, Cyt2Ba5, Cyt2Ba6, Cyt2Ba7, Cyt2Ba8, Cyt2Ba9, Cyt2Ba10, Cyt2Ba11, Cyt2Ba12, Cyt2Ba13, Cyt2Ba14, Cyt2Ba15, Cyt2Ba16, Cyt2Ba-like, Cyt2Bb1, Cyt2Bc1, Cyt2B-like, Cyt2Ca1, and/or Cyt3Aa1.

[0839] In some embodiments, an IA can be any Cyt toxin as described herein, or presented in Table 8.

TABLE 8
Non-limiting examples of Cyt toxins, their accession numbers
on NCBI, and strain. Here, if a cell is left blank, then
the accession number and/or strain is not applicable.

| Name | NCBI Accession No. | Strain/Other ID |
|---|---|---|
| Cyt1Aa1 | X03182 | Bt israelensis |
| Cyt1Aa2 | X04338 | Bt israelensis |
| Cyt1Aa3 | Y00135 | Bt morrisoni PG14 |
| Cyt1Aa4 | M35968 | Bt morrisoni PG14 |
| Cyt1Aa5 | AL731825 | Bt israelensis |
| Cyt1Aa6 | ABC17640 | Bt LLP29 |
| Cyt1Aa7 | KF152888 | Bt BRC-HQY1 |
| Cyt1Aa8 | MF893205 | |
| Cyt1Aa-like | ABB01172 | Bt LDC-9 |
| Cyt1Ab1 | X98793 | Bt medellin |
| Cyt1Ba1 | U37196 | Bt neoleoensis |
| Cyt1Ca1 | AL731825 | Bt israelensis |
| Cyt1Da1 | HQ113115 | Bt MC28 |
| Cyt1Da2 | JN226105 | hs18-1 |
| Cyt2Aa1 | Z14147 | Bt kyushuensis |
| Cyt2Aa2 | AF472606 | Bt darmstadiensis73E10 |
| Cyt2Aa3 | EU835185 | Bt MC28 |
| Cyt2Aa4 | AEG19547 | Bt WFS-97 |
| Cyt2Bal | U52043 | Bt israelensis 4Q2 |
| Cyt2Ba2 | AF020789 | Bt israelensis PG14 |
| Cyt2Ba3 | AF022884 | Bt fuokukaensis |
| Cyt2Ba4 | AF022885 | Bt morrisoni HD12 |
| Cyt2Ba5 | AF022886 | Bt morrisoni HD518 |
| Cyt2Ba6 | AF034926 | Bt tenebrionis |
| Cyt2Ba7 | AF215645 | Bt T301 |
| Cyt2Ba8 | AF215646 | Bt T36 |
| Cyt2Ba9 | AL731825 | Bt israelensis |
| Cyt2Ba10 | ACX54358 | Bti HD 567 |
| Cyt2Bal1 | ACX54359 | Bti HD 522 |
| Cyt2Ba12 | ACX54360 | Bti INTA H41-1 |
| Cyt2Ba13 | FJ205865 | INTA 160-2 |
| Cyt2Bal4 | FJ205866 | Bti IPS82 |
| Cyt2Ba15 | JF283552 | Bt LLP29 |
| Cyt2Ba16 | MG181950 | QL32-1 |
| Cyt2Ba-like | ABE99695 | Bt LDC-9 |
| Cyt2Bb1 | U82519 | Bt jegathesan |
| Cyt2Bc1 | CAC80987 | Bt medellin |
| Cyt2B-like | DQ341380 | |
| Cyt2Ca1 | AAK50455 | Bt |
| Cyt3Aa1 | HM596591 | Bt TD516 |

[0840] In some embodiments, an IA can be a protein belonging to the Vip1, Vip2, Vip3, or Vip4 family. For example, in some embodiments, an IA can be one or more of the following Vip proteins: Vip1Aa1, Vip1Aa2, Vip1Aa3, Vip1Ab1, Vip1Ac1, Vip1Ad1, Vip1Ba1, Vip1Ba2, Vip1Bb1, Vip1Bb2, Vip1Bb3, Vip1Bc1, Vip1Ca1, Vip1Ca2, Vip1Da1, Vip2Aa1, Vip2Aa2, Vip2Aa3, Vip2Ab1, Vip2Ac1, Vip2Ac2, Vip2Ad1, Vip2Ae1, Vip2Ae2, Vip2Ae3, Vip2Af1, Vip2Af2, Vip2Ag1, Vip2Ag2, Vip2Ba1, Vip2Ba2, Vip2Bb1, Vip2Bb2, Vip2Bb3, Vip2Bb4, Vip3Aa1, Vip3Aa2, Vip3Aa3, Vip3Aa4, Vip3Aa5, Vip3Aa6, Vip3Aa7, Vip3Aa8, Vip3Aa9, Vip3Aa10, Vip3Aa11, Vip3Aa12, Vip3Aa13, Vip3Aa14, Vip3Aa15, Vip3Aa16, Vip3Aa17, Vip3Aa18, Vip3Aa19.0, Vip3Aa19, Vip3Aa20, Vip3Aa21, Vip3Aa22, Vip3Aa23, Vip3Aa24, Vip3Aa25, Vip3Aa26, Vip3Aa27, Vip3Aa28, Vip3Aa29, Vip3Aa30, Vip3Aa31, Vip3Aa32, Vip3Aa33, Vip3Aa34, Vip3Aa35, Vip3Aa36, Vip3Aa37, Vip3Aa38, Vip3Aa39, Vip3Aa40, Vip3Aa41, Vip3Aa42, Vip3Aa43, Vip3Aa44, Vip3Aa45, Vip3Aa46, Vip3Aa47, Vip3Aa48, Vip3Aa49, Vip3Aa50, Vip3Aa51, Vip3Aa52, Vip3Aa53, Vip3Aa54, Vip3Aa55, Vip3Aa56, Vip3Aa57, Vip3Aa58, Vip3Aa59, Vip3Aa60, Vip3Aa61, Vip3Aa62, Vip3Aa63, Vip3Aa64, Vip3Aa65, Vip3Aa66, Vip3Ab1, Vip3Ab2, Vip3Ac1, Vip3Ad1, Vip3Ad2, Vip3Ad3, Vip3Ad4, Vip3Ad5, Vip3Ad6, Vip3Ae1, Vip3Af1, Vip3Af2, Vip3Af3, Vip3Af4, Vip3Ag1, Vip3Ag2, Vip3Ag3, Vip3Ag4, Vip3Ag5, Vip3Ag6, Vip3Ag7, Vip3Ag8, Vip3Ag9, Vip3Ag10, Vip3Ag11, Vip3Ag12, Vip3Ag13, Vip3Ag14, Vip3Ag15, Vip3Ah1, Vip3Ah2, Vip3Ai1, Vip3Aj1, Vip3Aj2, Vip3Ba1, Vip3Ba2, Vip3Bb1, Vip3Bb2, Vip3Bb3, Vip3Bc, Vip3Ca1, Vip3Ca2, Vip3Ca3, Vip3Ca4, and/or Vip4Aa1.

[0841] In some embodiments, an IA can be any Vip protein as described herein, or presented in Table 9.

TABLE 9
Non-limiting examples of Vip proteins and their accession
numbers on NCBI. Here, if a cell is left blank, then the
accession number is not applicable.

| Name | NCBI Accession No. |
|---|---|
| Vip1Aa1 | |
| Vip1Aa2 | AAR81088 |
| Vip1Aa3 | GU992203 |
| Vip1Ab1 | |
| Vip1Ac1 | HM439098 |
| Vip1Ad1 | AGC08395 |
| Vip1Ba1 | AAR40886 |
| Vip1Ba2 | CAI43278 |
| Vip1Bb1 | AAR40282 |
| Vip1Bb2 | HM485584 |
| Vip1Bb3 | KR065727 |
| Vip1Bc1 | HM485583 |
| Vip1Ca1 | AAO86514 |
| Vip1Ca2 | KR065725 |
| Vip1Da1 | CAI40767 |
| Vip2Aa1 | 1QS1A |
| Vip2Aa2 | AAR81096 |
| Vip2Aa3 | HM439097 |
| Vip2Ab1 | |
| Vip2Ac1 | AAO86513 |
| Vip2Ac2 | KR065726 |
| Vip2Ad1 | CAI40768 |
| Vip2Ae1 | EF442245 |
| Vip2Ae2 | ACH42758 |
| Vip2Ae3 | HM439099 |
| Vip2Af1 | ACH42759 |
| Vip2Af2 | EU909204 |
| Vip2Ag1 | AGC08396 |
| Vip2Ag2 | KC951878 |
| Vip2Ba1 | AAR40887 |
| Vip2Ba2 | CAI43279 |
| Vip2Bb1 | |
| Vip2Bb2 | HM485585 |
| Vip2Bb3 | KJ868170 |
| Vip2Bb4 | KR065728 |
| Vip3Aa1 | AAC37036 |
| Vip3Aa2 | AAC37037 |
| Vip3Aa3 | |
| Vip3Aa4 | AAR81079 |
| Vip3Aa5 | AAR81080 |
| Vip3Aa6 | AAR81081 |
| Vip3Aa7 | AAK95326 |
| Vip3Aa8 | AAK97481 |
| Vip3Aa9 | CAA76665 |
| Vip3Aa10 | AAN60738 |
| Vip3Aa11 | AAR36859 |
| Vip3Aa12 | AAM22456 |
| Vip3Aa13 | AAL69542 |
| Vip3Aa14 | AAQ12340 |
| Vip3Aa15 | AAP51131 |
| Vip3Aa16 | AAW65132 |
| Vip3Aa17 | |
| Vip3Aa18 | AAX49395 |
| Vip3Aa19.0 | DQ241674 |
| Vip3Aa19 | DQ539887 |
| Vip3Aa20 | DQ539888 |
| Vip3Aa21 | ABD84410 |
| Vip3Aa22 | AAY41427 |
| Vip3Aa23 | AAY41428 |
| Vip3Aa24 | BI 880913 |
| Vip3Aa25 | EF608501 |
| Vip3Aa26 | EU294496 |
| Vip3Aa27 | EU332167 |
| Vip3Aa28 | FJ494817 |
| Vip3Aa29 | FJ626674 |
| Vip3Aa30 | FJ626675 |
| Vip3Aa31 | FJ626676 |
| Vip3Aa32 | FJ626677 |
| Vip3Aa33 | GU073128 |
| Vip3Aa34 | GU073129 |
| Vip3Aa35 | GU733921 |
| Vip3Aa36 | GU951510 |
| Vip3Aa37 | HM132041 |
| Vip3Aa38 | HM117632 |
| Vip3Aa39 | HM117631 |
| Vip3Aa40 | HM132042 |
| Vip3Aa41 | HM132043 |
| Vip3Aa42 | HQ587048 |
| Vip3Aa43 | HQ594534 |
| Vip3Aa44 | HQ650163 |
| Vip3Aa45 | JF710269 |
| Vip3Aa46 | JQ228436 |
| Vip3Aa47 | JQ228435 |
| Vip3Aa48 | JQ731616 |
| Vip3Aa49 | JQ731617 |
| Vip3Aa50 | JQ946639 |
| Vip3Aa51 | KC156649 |
| Vip3Aa52 | KF826718 |
| Vip3Aa53 | KF826723 |
| Vip3Aa54 | AHK23264 |
| Vip3Aa55 | KJ868172 |
| Vip3Aa56 | LN624748 |
| Vip3Aa57 | AJD18609 |
| Vip3Aa58 | KR259139 |
| Vip3Aa59 | KR259140 |
| Vip3Aa60 | KR340473 |
| Vip3Aa61 | KU522245 |
| Vip3Aa62 | KT792883 |
| Vip3Aa63 | KY780302 |
| Vip3Aa64 | KY883694 |
| Vip3Aa65 | MH290720 |
| Vip3Aa66 | MK252100 |
| Vip3Ab1 | AAR40284 |
| Vip3Ab2 | AAY88247 |
| Vip3Ac1 | |
| Vip3Ad1 | |
| Vip3Ad2 | CAI43276 |
| Vip3Ad3 | KF826720 |
| Vip3Ad4 | KF826727 |
| Vip3Ad5 | KR263164 |
| Vip3Ad6 | KU761577 |
| Vip3Ae1 | CAI43277 |
| Vip3Af1 | CAI43275 |
| Vip3Af2 | |
| Vip3Af3 | HM117634 |
| Vip3Af4 | KM276664 |
| Vip3Ag1 | |
| Vip3Ag2 | FJ556803 |
| Vip3Ag3 | HM117633 |
| Vip3Ag4 | HQ414237 |
| Vip3Ag5 | HQ542193 |
| Vip3Ag6 | JQ397328 |
| Vip3Ag7 | KF826713 |
| Vip3Ag8 | KF826714 |
| Vip3Ag9 | KF826715 |
| Vip3Ag10 | KF826716 |
| Vip3Ag11 | KF826719 |
| Vip3Ag12 | KF826721 |
| Vip3Ag13 | KF826722 |
| Vip3Ag14 | KF826725 |
| Vip3Ag15 | KF826726 |
| Vip3Ah1 | DQ832323 |
| Vip3Ah2 | AQY42675 |
| Vip3Ai1 | KC156693 |
| Vip3Aj1 | KF826717 |
| Vip3Aj2 | KF826724 |
| Vip3Ba1 | AAV70653 |
| Vip3Ba2 | HM117635 |
| Vip3Bb1 | |
| Vip3Bb2 | ABO30520 |
| Vip3Bb3 | ADI48120 |
| Vip3Bc | MF543028 |
| Vip3Ca1 | ADZ46178 |
| Vip3Ca2 | AEE98106 |
| Vip3Ca3 | HQ876489 |
| Vip3Ca4 | JN836992 |
| Vip4Aa1 | HM044666 |

[0842] Crip and Ia Combinations

[0843] Any of the aforementioned CRIPs or IAs can be used to create a mixture and/or composition of the present invention, wherein said mixture and/or composition comprises at least one CRIP, and at least one other IA.

[0844] Described and incorporated by reference to the polypeptides identified herein are homologous variants of sequences mentioned, having homology to such sequences or referred to herein, including all homologous sequences having at least any of the following percent identities to any of the sequences disclosed here or to any sequence incorporated by reference: 50%, 55%, 60%, 65%, 70%, 75%, 80%, 85%, 90%, 95%, 96%, 97%, 98%, or 99% or greater identity, or 100% identity to any and all sequences identified in the sequences noted above, and to any other sequence identified herein, including each and every sequence in the sequence listing of this application. When the term homologous or homology is used herein with a number such as 50% or greater, then what is meant is percent identity or percent similarity between the two peptides. When homologous or homology is used without a numeric percent then it refers to two peptide sequences that are closely related in the evolutionary or developmental aspect in that they share common physical and functional aspects, like topical toxicity and similar size (i.e., the homolog being within 100% greater length or 50% shorter length of the peptide specifically mentioned herein or identified by reference herein as above).

[0845] In some embodiments a mixture can consist of any CRIP described herein, and any IA described herein.

[0846] In some embodiments, a mixture can comprise one or more CRIPs combined with one or more IAs; and wherein the mixture further comprises an excipient.

[0847] CRIP and IA Combinations

[0848] In some embodiments, any one or more of the CRIPs presented in Table A may be combined with any one or more of the IAs presented in Table B.

[0849] Table A and Table B below presents preferred CRIPs and IAs of the present invention, respectfully. Both tables provide a “Group No.” and a “Group Name”: these designations identify the category a given CRIP or IA belongs to. CRIP Group Nos are preceded by the Roman numeral “I” (e.g., I1, I2, I3, etc.). Insecticidal Agent (IA) Group Nos are preceded by the Roman numeral “II” (e.g., II2, II3, II3, etc.). A further level of specificity is provided with the “CRIP No.” and “IA No.”; these designations identify specific CRIPs or IAs. The CRIP Nos are preceded by an “A” (e.g., A1, A2, A3, etc.). IA Nos are preceded by a “B” (e.g., B1, B2, B3, etc.).

TABLE A
CRIPs of the present invention.

| | | CRIP No. | | |
|---|---|---|---|---|
| | | (Preceded | | SEQ |
| Group No. | Group Name | by “A”) | Name | ID NO. |
| I1 | U1-agatoxin- | 1 | WT-Ta1b | 1 |
| | Ta1b | | | |
| I2 | U1-agatoxin- | 2 | TVP-R9Q | 2 |
| | Ta1b Variant | 3 | TVP-R9QΔG | 3 |
| | Polypeptides | 4 | TVP-K18A | 4 |
| | (TVPs) | 5 | TVP-K18AΔG | 5 |
| | | 6 | TVP-R38A | 6 |
| | | 7 | TVP-R38AΔG | 7 |
| | | 8 | TVP-A8N | 8 |
| | | 9 | TVP-A8NΔG | 9 |
| | | 10 | TVP-A8S | 10 |
| | | 11 | TVP-A8SΔG | 11 |
| | | 12 | TVP-R9N | 12 |
| | | 13 | TVP-R9NΔG | 13 |
| | | 14 | TVP-T11P | 14 |
| | | 15 | TVP-T11PΔG | 15 |
| | | 16 | TVP-T43A | 49 |
| | | 17 | TVP-T43AΔG | 50 |
| | | 18 | TVP-R9Q/T43A | 51 |
| | | 19 | TVP-R9Q/T43A/ΔG | 52 |
| | | 20 | TVP-R9Q/T43A/ΔK-G | 53 |
| | | 21 | TVP-R9A | 621 |
| | | 22 | TVP-R9G | 622 |
| | | 23 | TVP-R9N | 623 |
| | | 24 | TVP-R9L | 624 |
| | | 25 | TVP-R9D | 625 |
| | | 26 | TVP-R9V | 626 |
| | | 27 | TVP-R9M | 627 |
| | | 28 | TVP-R9I | 628 |
| | | 29 | TVP-R9Q/T43A | 629 |
| | | 30 | TVP-R9Q | 630 |
| | | 31 | TVP-R9C | 631 |
| | | 32 | TVP-R9E | 632 |
| | | 33 | TVP-R9T | 633 |
| | | 34 | TVP-R9S | 634 |
| | | 35 | TVP-T43F | 635 |
| | | 36 | TVP-T43P | 636 |
| | | 37 | TVP-T43Y | 637 |
| | | 38 | TVP-T43K | 638 |
| | | 39 | TVP-T43W | 639 |
| | | 40 | TVP-T43H | 640 |
| | | 41 | TVP-T43A | 641 |
| | | 42 | TVP-T43G | 642 |
| | | 43 | TVP-T43N | 643 |
| | | 44 | TVP-T43L | 644 |
| | | 45 | TVP-T43D | 645 |
| | | 46 | TVP-T43V | 646 |
| | | 47 | TVP-T43M | 647 |
| | | 48 | TVP-T43I | 648 |
| | | 49 | TVP-T43Q | 649 |
| | | 50 | TVP-T43C | 650 |
| | | 51 | TVP-T43E | 651 |
| | | 52 | TVP-T43T | 652 |
| | | 53 | TVP-T43S | 653 |
| | | 54 | TVP-T43R | 654 |
| I3 | Scorpion | 55 | IpTx-a | 66 |
| | Toxins | 56 | AaIT1 | 88 |
| I4 | Sea Anemone | 57 | WT Av2 | 588 |
| | Toxins | 58 | WT Av3 | 44 |
| I5 | Av3 Variant | 59 | AVPa | 45 |
| | Polypeptides | 60 | AVPa-C1 | 46 |
| | (AVPs) | 61 | AVPb | 47 |
| I6 | Atracotoxin | 62 | U-ACTX-Hv1a | 60 |
| | (ACTX) | 63 | U+2-ACTX-Hv1a | 61 |
| | | 64 | ω-ACTX-Hv1a | 62 |
| | | 65 | ω+2-ACTX-Hv1a | 63 |
| | | 66 | K+2-ACTX-Hv1a | 64 |
| | | 67 | K-ACTX-Hv1a | 594 |
| I7 | Phoneutria | 68 | Γ-CNTX-Pn1a | 65 |
| | Toxins | | | |

TABLE B
Insecticidal Agents (IAs) of the present invention. Here,
the asterisk “*” indicates an IA that was shown to not
exert a greater than additive insecticidal effect
when combined with U+2-ACTX-Hv1a (SEQ ID NO: 61).

| | | IA No. | |
|---|---|---|---|
| Group | | (Preceded by | |
| No. | Group Name | “B”) | IA Name |
| II1 | RNAi | 1 | dsRNA (e.g., WupA dsRNA) |
| II2 | Stomach Poisons | 2 | Arsenicals |
| | | 3 | “Paris green” or copper |
| | | | acetoarsenite |
| | | 4 | Lead arsenate |
| | | 5 | Calcium arsenate |
| | | 6 | Fluorine compounds |
| | | 7 | Sodium fluoride |
| | | 8 | Cryolite* |
| | | 9 | Boron-containing compounds |
| | | 10 | Borates (e.g. |
| | | 11 | Borax |
| | | 12 | Boric acid |
| | | 13 | Disodium octaborate |
| | | 14 | Sodium borate |
| | | 15 | Sodium metaborate |
| | | 16 | Sodium tetraborate decahydrate |
| | | 17 | Boron oxide |
| | | 18 | Boron carbide |
| | | 19 | Boron nitride |
| | | 20 | Boron tribromide |
| | | 21 | Boron trichloride |
| | | 22 | Boron trifluoride |
| | | 23 | Anhydrous borax (Na₂B₄O₇) |
| | | 24 | Ammonium tetraborate |
| | | | ((NH₄)₂B₄O₇•4H₂O) |
| | | 25 | Ammonium pentaborate |
| | | | ((NH₄)₂B₁₀O₁₆•8H₂O) |
| | | 26 | Potassium pentaborate |
| | | | (K₂B₁₀O₁₆•8H₂O) |
| | | 27 | Potassium tetraborate |
| | | | (K₂B₄O₇•4H₂O) |
| | | 28 | Sodium metaborate |
| | | | (Na₂B₂O4•8H₂O) |
| | | 29 | Sodium metaborate |
| | | | (Na₂B₂O₄•4H₂O) |
| | | 30 | Disodium tetraborate decahydrate |
| | | | (Na₂B₄O₇•10H₂O) |
| | | 31 | Disodium tetraborate |
| | | | pentahydrate (Na₂B₄O₇•5H₂O) |
| | | 32 | Disodium octaborate tetrahydrate |
| | | | (Na₂B₈O₁₃•4H₂O) |
| II3 | Inhibitors of | 33 | Benzoylureas |
| | chitin | 34 | Bistrifluron |
| | biosynthesis | 35 | Chlorfluazuron |
| | type 0 | 36 | Diflubenzuron |
| | | 37 | Flucycloxuron |
| | | 38 | Flufenoxuron |
| | | 39 | Hexaflumuron |
| | | 40 | Lufenuron |
| | | 41 | Novaluron* |
| | | 42 | Noviflumuron |
| | | 43 | Teflubenzuron |
| | | 44 | Triflumuron |
| II4 | Inhibitors of | 45 | Buprofezin |
| | chitin | | |
| | biosynthesis, | | |
| | type 1 | | |
| II5 | Insect Viruses | 46 | Baculoviridae viruses |
| | | 47 | Alphabaculovirus |
| | | 48 | Betabaculoviruses |
| | | 49 | Deltabaculovirus |
| | | 50 | Gammabaculovirus |
| | | 51 | Granuloviruses (GVs) |
| | | 52 | Nucleopolyhedroviruses (NPVS) |
| | | 53 | Cydia pomonella GV |
| | | 54 | Cydia pomonella GV isolate V22 |
| | | 55 | Thaumatotibia leucotreta GV |
| | | 56 | Anticarsia gemmatalis MNPV |
| | | 57 | Helicoverpa armigera NPV |
| | | 58 | Parvoviridae viruses |
| | | 59 | Junonia coenia densovirus |
| | | | (JcDNV) |
| | | 60 | Ascoviridae family viruses |
| | | 61 | Densovirinae family viruses |
| | | 62 | Entomopoxvirinae family viruses |
| | | 63 | Iridoviridae family viruses |
| | | 64 | Nudiviridae family viruses |
| II6 | Compounds | 65 | Azadirachtin |
| | isolated from | 66 | Azadiradione |
| | Azadirachta | 67 | Azadiradionolide |
| | indica | 68 | Deacetylgedunin |
| | | 69 | Deacetylazadirachtinol |
| | | 70 | Desfuranoazadiradione |
| | | 71 | Epoxyazadiradione |
| | | 72 | Gedunin |
| | | 73 | Mahmoodin |
| | | 74 | Neemfruitin A |
| | | 75 | Neemfruitin B |
| | | 76 | Nimbolide |
| | | 77 | Nimbin |
| | | 78 | Nimolicinol |
| | | 79 | Ohchinin Acetate |
| | | 80 | Salannin |
| | | 81 | Salannol |
| | | 82 | Alpha-Nimolactone |
| | | 83 | Beta-Nimolactone |
| | | 84 | 2′,3′-Dihydrosalannin |
| | | 85 | 3-Deacetylsalannin |
| | | 86 | 6-Deacetylnimbin |
| | | 87 | 7-Acetyl-16,17-dehydro-16- |
| | | | hydroxyneotrichilenone |
| | | 88 | 7-Benzoylnimbocinol |
| | | 89 | 7-Deacetyl-7- |
| | | | benzoylepoxyazadiradione |
| | | 90 | 7-Deacetyl-7-benzoylgedunin |
| | | 91 | 7-Deacetyl-17-epinimolicinol |
| | | 92 | 15-Hydroxyazadiradione |
| | | 93 | 17-Epi-17-Hydroxyazadiradione |
| | | 94 | 17-Epiazadiradione |
| | | 95 | 20,21,22,23-Tetrahydro-23- |
| | | | oxoazadirone |
| | | 96 | 22,23-Dihydronimocinol |
| | | 97 | 28-Deoxonimbolide |
| II7 | Compounds | 98 | Benzoximate |
| | with unknown | 99 | Bromopropylate |
| | MOAs | 100 | Chinomethionat |
| | | 101 | Dicofol |
| | | 102 | Lime sulfur |
| | | 103 | Pyridalyl |
| | | 104 | Sulfur |
| II8 | Bacteria: | 105 | Brevibacillus brevis |
| | including the | 106 | Brevibacillus brevis toxins |
| | fermentation | 107 | TIC4670 Beta pore forming |
| | solids, spores, | | protein |
| | toxins, and/or | 108 | Alcaligenes faecalis |
| | products | 109 | Alcaligenes faecalis toxins |
| | therefrom | 110 | AfIP-1A/1B |
| | | 111 | Pseudomonas chlororaphis |
| | | 112 | Pseudomonas chlororaphis toxins |
| | | 113 | PIP-72Aa |
| | | 114 | Yersinia entomophaga |
| | | 115 | Yersinia entomophaga MH96 |
| | | 116 | Yersinia nurmii |
| | | 117 | Photorhabdus luminescens |
| | | 118 | Photorhabdus luminescens “toxin |
| | | | complex a” (Tca) |
| | | 119 | Photorhabdus luminescens “toxin |
| | | | complex c” (Tcc) |
| | | 120 | Photorhabdus luminescens “toxin |
| | | | complex d” (Tcd) |
| | | 121 | Photorhabdus luminescens Tca |
| | | | comprising TcaA protein (SEQ |
| | | | ID NO: 616), TcaB protein |
| | | | (SEQ ID NO: 617), TcaC |
| | | | protein (SEQ ID NO: 618), and |
| | | | TcaZ protein (SEQ ID NO: |
| | | | 619) |
| | | 122 | Burkholderia spp |
| | | 123 | Wolbachie pipientis |
| | | 124 | Bacillus thuringiensis |
| | | 125 | Bacillus thuringiensis toxins |
| | | 126 | Bacillus thuringiensis var. |
| | | | israelensis |
| | | 127 | Bacillus thuringiensis var. |
| | | | israelensis toxins |
| | | 128 | Bacillus thuringiensis var. |
| | | | aizawai |
| | | 129 | Bacillus thuringiensis var. |
| | | | aizawai toxins |
| | | 130 | Bacillus thuringiensis var. |
| | | | kurstaki |
| | | 131 | Bacillus thuringiensis var. |
| | | | kurstaki toxins |
| | | 132 | Bacillus thuringiensis var. |
| | | | tenebrionensis |
| | | 133 | Bacillus thuringiensis var. |
| | | | tenebrionensis toxins |
| | | 134 | Bacillus sphaericus |
| | | 135 | Bacillus thuringiensis toxins |
| | | 136 | Parasporal crystal toxins |
| | | 137 | δ-endotoxins |
| | | 138 | Cry toxins |
| | | 139 | Cyt toxins |
| | | 140 | Secreted protein |
| | | 141 | Vegetative insecticidal proteins |
| | | | (Vips) |
| | | 142 | Secreted insecticidal proteins |
| | | | (Sips) |
| | | 143 | Bin-like family proteins |
| | | 144 | ETX MTX2-family proteins |
| | | 145 | Bacillus thuringiensis ssp. |
| | | | kurstaki strain EVB-113-19 cells |
| | | 146 | Fermentation solids, spores, and/ |
| | | | or insecticidal toxins isolated |
| | | | from Bacillus thuringiensis ssp. |
| | | | kurstaki strain EVB-113-19 cells |
| | | 147 | Bacillus thuringiensis ssp. |
| | | | tenebrionis strain NB-176 cells |
| | | 148 | Fermentation solids, spores, and/ |
| | | | or insecticidal toxins isolated |
| | | | from Bacillus thuringiensis ssp. |
| | | | tenebrionis strain NB-176 cells |
| | | 149 | Bacillus thuringiensis ssp. |
| | | | israelensis Strain BMP 144 cells |
| | | 150 | Fermentation solids, spores, and/ |
| | | | or insecticidal toxins isolated |
| | | | from Bacillus thuringiensis ssp. |
| | | | israelensis Strain BMP 144 cells. |
| II9 | Fungi: including | 151 | Ascomycete fungi |
| | the fermentation | 152 | Cordycipitaceae fungi |
| | solids, spores, | 153 | Beauveria bassiana and/or the |
| | toxins, and/or | | toxins therefrom |
| | products | 154 | Beauvericin |
| | therefrom | 155 | Beauvericin having the chemical |
| | | | formula C₄₅H₅₇N₃O₉ |
| | | 156 | “Beauvericin A” toxin having the |
| | | | chemical formula C₄₆H₅₉N₃O₉ |
| | | 157 | “Beauvericin B” toxin having the |
| | | | chemical formula C₄₇H₆₁N₃O₉ |
| | | 158 | Beauveria bassiana strain ANT- |
| | | | 03 spore |
| | | 159 | Cordyceps bassiana, and/or the |
| | | | toxins therefrom |
| | | 160 | Metarhizium anisopliae (e.g., |
| | | | strain F52) and the products |
| | | | therefrom |
| | | 161 | Paecilomyces fumosoroseus (e.g., |
| | | | Apopka strain 97) and the |
| | | | products therefrom |
| II10 | Nematodes | 162 | Steinernema glaseri and/or the |
| | | | products therefrom |
| | | 163 | Heterorhabditis bacteriophora |
| | | | and/or the products therefrom |
| I11 | Botanical | 164 | Dysphania ambrosioides |
| | essences | 165 | Near ambrosioides extract |
| | | 166 | Fatty acid monoesters with |
| | | | glycerol |
| | | 167 | Propanediol Neem oil |
| | | 168 | Neem oil |
| II12 | Mechanical | 169 | Diatomaceous earth |
| | disruptors | 170 | Minerals |
| | | 171 | Synthetic/natural fibers |
| II13 | Fluorescent | 172 | Calcofluor White M2R |
| | brighteners | | |
| II14 | Silica | 173 | NanoXact Silica Nanospheres* |
| | nanospheres | | |
| II15 | Chitinases | 174 | Chitinase from Streptomyces |
| | | | griseus |
| II16 | Lectins | 175 | Galanthus nivalis agglutinin |
| | | | (GNA) |
| | | 176 | Sambucus nigra lectin (SNA) |
| | | 177 | Leukoagglutinating lectin from |
| | | | the seeds of Maackia amurensis |
| | | | (MAL) |
| | | 178 | Maackia amurensis-II (MAL-II) |
| | | 179 | Erythrina cristagalli lectin (ECL) |
| | | 180 | Ricinus communis agglutinin-I |
| | | | (RCA) |
| | | 181 | Peanut agglutinin (PNA) |
| | | 182 | Agglutinin isolectin 1 (WGA1) |
| | | 183 | Wheat germ agglutinin (WGA) |
| | | 184 | Griffonia simplicifolia-II (GSL-II) |
| | | 185 | Con A |
| | | 186 | Concanavalin-A (CNA) precursor |
| | | 187 | Lens culinaris agglutinin (LCA) |
| | | 188 | Mannose-binding lectin (MBL) |
| | | 189 | Jacalin-like lectin (Chain A) |
| | | 190 | Lectin alpha-1 chain |
| | | 191 | Lectin CaBo |
| | | 192 | BanLec |
| | | 193 | Galectins |
| | | 194 | Lectin ConGF |
| | | 195 | Mannose-specific lectin alpha |
| | | | chain |
| | | 196 | Beta-galactoside-specific lectin 1 |
| | | 197 | Galectin-3 |
| | | 198 | Phaseolus vulgaris |
| | | | Leucoagglutinin (PHA-L) |
| | | 199 | Phaseolus vulgaris |
| | | | Erythroagglutinin (PHA-E) |
| | | 200 | Datura stramonium Lectin (DSL) |
| | | 201 | Mannose/glucose-specific lectin |
| | | | Cramoll |
| | | 202 | Beta-galactoside-specific lectin 3 |
| | | 203 | Lactose-binding lectin-2 |
| | | 204 | Galectin-1 |
| | | 205 | Alpha-N-acetylgalactosamine- |
| | | | specific lectin |
| | | 206 | Favin |
| II17 | Membrane | 207 | MACPF isolated from fern |
| | Attack | 208 | GNIP1Aa isolated form |
| | Complex/ | | chromobacteria |
| | Perforin | | |
| | (MACPF) | | |
| | proteins | | |
| II18 | Plant virus coat | 209 | Pea enation mosaic virus |
| | protein-toxin | | (PEMV) fusion |
| | fusions | 210 | POC anti-aphids |
| II19 | Glycan binding | 211 | Chitinase glycan binding domain |
| | domain/toxin | | from Yersinia entomophaga |
| | fusion proteins | | MH96 fused to- |
| | | 212 | Glycan binding domain from |
| | | | GNA fused to- |
| | | 213 | Glycan binding domain from |
| | | | plant Luteovirus fused to- |
| | | 214 | Glycan binding domain from |
| | | | insect Parvoviridae fused to- |
| | | 215 | Glycan binding domain from |
| | | | insect Baculoviridae viruses |
| | | | fused to- |
| II20 | Acetyl- | 216 | Alanycarb |
| | cholinesterase | 217 | Aldicarb |
| | (AchE) | 218 | Bendiocarb |
| | inhibitors | 219 | Benfuracarb |
| | | 220 | Butocarboxim |
| | | 221 | Butoxycarboxim |
| | | 222 | Carbaryl |
| | | 223 | Carbofuran |
| | | 224 | Carbosulfan |
| | | 225 | Ethiofencarb |
| | | 226 | Fenobucarb |
| | | 227 | Formetanate |
| | | 228 | Furathiocarb |
| | | 229 | Isoprocarb |
| | | 230 | Methiocarb |
| | | 231 | Methomyl |
| | | 232 | Metolcarb |
| | | 233 | Oxamyl |
| | | 234 | Pirimicarb |
| | | 235 | Propoxur |
| | | 236 | Thiodicarb |
| | | 237 | Thiofanox |
| | | 238 | Triazamate |
| | | 239 | Trimethacarb |
| | | 240 | Xmc |
| | | 241 | Xylylcarb |
| | | 242 | Organophosphates |
| | | 243 | Acephate |
| | | 244 | Azamethiphos |
| | | 245 | Azinphos-ethyl |
| | | 246 | Azinphos-methyl |
| | | 247 | Cadusafos |
| | | 248 | Chlorethoxyfos |
| | | 249 | Chlorfenvinphos |
| | | 250 | Chlormephos |
| | | 251 | Chlorpyrifos |
| | | 252 | Chlorpyrifos-methyl |
| | | 253 | Coumaphos |
| | | 254 | Cyanophos |
| | | 255 | Demeton-s-methyl |
| | | 256 | Diazinon |
| | | 257 | Dichlorvos/ddvp |
| | | 258 | Dicrotophos |
| | | 259 | Dimethoate |
| | | 260 | Dimethylvinphos |
| | | 261 | Disulfoton |
| | | 262 | Epn |
| | | 263 | Ethion |
| | | 264 | Ethoprophos |
| | | 265 | Famphur |
| | | 266 | Fenamiphos |
| | | 267 | Fenitrothion |
| | | 268 | Fenthion |
| | | 269 | Fosthiazate |
| | | 270 | Heptenophos |
| | | 271 | Isofenphos |
| | | 272 | Isoxathion |
| | | 273 | Malathion |
| | | 274 | Mecarbam |
| | | 275 | Methamidophos |
| | | 276 | Methidathion |
| | | 277 | Mevinphos |
| | | 278 | Monocrotophos |
| | | 279 | Naled |
| | | 280 | Omethoate |
| | | 28 | Oxydemeton-methyl |
| | | 282 | Parathion |
| | | 283 | Parathion-methyl |
| | | 284 | Phenthoate |
| | | 285 | Phosalone |
| | | 286 | Phorate |
| | | 287 | Phosmet |
| | | 288 | Phosphamidon |
| | | 289 | Phoxim |
| | | 290 | Profenofos |
| | | 291 | Propetamphos |
| | | 292 | Prothiofos |
| | | 293 | Pyraclofos |
| | | 294 | Pyridaphenthion |
| | | 295 | Quinalphos |
| | | 296 | Sulfotep |
| | | 297 | Tebupirimfos |
| | | 298 | Temephos |
| | | 299 | Terbufos |
| | | 300 | Tetrachlorvinphos |
| | | 301 | Thiometon |
| | | 302 | Triazophos |
| | | 303 | Trichlorfon |
| | | 304 | Vamidothion |
| | | 305 | Pirimiphos-methyl |
| | | 306 | Imicyafos |
| | | 307 | Isopropyl o-(methoxyaminothio- |
| | | | phosphoryl) salicylate |
| II21 | GABA-gated | 308 | Cyclodiene organochlorines |
| | chloride channel | 309 | Chlordane |
| | blockers | 310 | Endosulfan |
| | | 311 | Phenylpyrazoles (fiproles) |
| | | 312 | Ethiprole |
| | | 313 | Fipronil |
| II22 | Sodium channel | 314 | Pyrethroids |
| | modulators | 315 | Pyrethrins |
| | | 316 | Acrinathrin |
| | | 317 | Allethrin |
| | | 318 | D-cis-trans allethrin |
| | | 319 | D-trans allethrin |
| | | 320 | Bifenthrin |
| | | 321 | Bioallethrin |
| | | 322 | Bioallethrin s-cyclopentenyl |
| | | 323 | Bioresmethrin |
| | | 324 | Cycloprothrin |
| | | 325 | Cyfluthrin |
| | | 326 | Beta-cyfluthrin |
| | | 327 | Cyhalothrin |
| | | 328 | Lambda-cyhalothrin |
| | | 329 | Gamma-cyhalothrin |
| | | 330 | Cypermethrin |
| | | 331 | Alpha-cypermethrin |
| | | 332 | Beta-cypermethrin |
| | | 333 | Theta-cypermethrin |
| | | 334 | Zeta-cypermethrin |
| | | 335 | Cyphenothrin [(1r)-trans-isomers] |
| | | 336 | Deltamethrin |
| | | 337 | Empenthrin [(ez)-(1r)-isomers] |
| | | 338 | Esfenvalerate |
| | | 339 | Etofenprox |
| | | 340 | Fenpropathrin |
| | | 34 | Fenvalerate |
| | | 342 | Flucythrinate |
| | | 343 | Flumethrin |
| | | 344 | Tau-fluvalinate |
| | | 345 | Kadathrin |
| | | 346 | Pyrethrins (pyrethrum) |
| | | 347 | Halfenprox |
| | | 348 | Phenothrin [(1r)-trans-isomer] |
| | | 349 | Prallethrin |
| | | 350 | Resmethrin |
| | | 351 | Silafluofen |
| | | 352 | Tefluthrin |
| | | 353 | Tetramethrin |
| | | 354 | Tetramethrin [(1r)-isomers] |
| | | 355 | Tralomethrin |
| | | 356 | Transfluthrin |
| | | 357 | And permethrin) |
| | | 358 | DDT |
| | | 359 | Methoxychlor |
| II23 | Nicotinic | 360 | Neonicotinoids |
| | acetylcholine | 361 | Acetamiprid |
| | receptor | 362 | Clothianidin |
| | (nAchR) | 363 | Dinotefuran |
| | Competitive | 364 | Imidacloprid |
| | Modulators | 365 | Nitenpyram |
| | | 366 | Thiacloprid |
| | | 367 | Thiamethoxam |
| | | 368 | Nicotine |
| | | 369 | Sulfoximines |
| | | 370 | Sulfoxaflor |
| | | 371 | Butenolides |
| | | 372 | Flupyradifurone |
| | | 373 | Mesoionics |
| | | 374 | Triflumezopyrim |
| II24 | Nicotinic | 375 | Spinosyns |
| | acetylcholine | 376 | Spinetoram |
| | receptor (nAchR) | 377 | Spinosad |
| | allosteric | | |
| | modulators-site I | | |
| II25 | Glutamate-gated | 378 | Avermectins |
| | chloride channel | 379 | Milbemycins |
| | (GluCl) allosteric | 380 | Abamectin |
| | modulators | 381 | Emamectin benzoate |
| | | 382 | Lepimectin |
| | | 383 | Milbemectin |
| II26 | Juvenile | 384 | Juvenile hormone analogues |
| | hormone | 385 | Hydroprene |
| | mimics | 386 | Kinoprene |
| | | 387 | And methoprene |
| | | 388 | Fenoxycarb |
| | | 389 | Pyriproxyfen |
| II27 | Miscellaneous | 390 | Alkyl halides |
| | non-specific | 391 | Methyl bromide |
| | (multi-site) | 392 | Alkyl halides |
| | inhibitors | 393 | Chloropicrin |
| | | 394 | Tartar emetic |
| | | 395 | Methyl isothiocyanate generators |
| | | 396 | Dazomet |
| | | 397 | Metam |
| II28 | Chordotonal | 398 | Pyridine azomethine derivatives |
| | organ | 399 | Pymetrozine |
| | TRPV channel | 400 | Pyrifluquinazon |
| | modulators | 401 | Pyropenes |
| | | 402 | Afidopyropen |
| II29 | Mite growth | 403 | Clofentezine |
| | inhibitors | 404 | Diflovidazin |
| | | 405 | Hexythiazox |
| | | 406 | Etoxazole |
| II30 | Inhibitors of | 407 | Diafenthiuron |
| | mitochondrial | 408 | Organotin miticides |
| | ATP synthase | 409 | Azocyclotin |
| | | 410 | Cyhexatin |
| | | 411 | And fenbutatin oxide |
| | | 412 | Propargite |
| | | 413 | Tetradifon |
| II31 | Uncouplers of | 414 | Pyrroles |
| | oxidative | 415 | Dinitrophenols |
| | phosphorylation | 416 | Sulfluramid |
| | via disruption | 417 | Chlorfenapyr |
| | of the proton | 418 | DNOC |
| | gradient | 419 | Sulfluramid |
| II32 | Nicotinic | 420 | Nereistoxin analogues |
| | acetylcholine | 421 | Bensultap |
| | receptor | 422 | Cartap hydrochloride |
| | (nAchR) channel | 423 | Thiocyclam |
| | blockers | 424 | Thiosultap-sodium |
| II34 | Moulting | 425 | Cyromazine |
| | disruptors | | |
| | (dipteran) | | |
| II35 | Ecdysone | 426 | Diacylhydrazines |
| | receptor | 427 | Chromafenozide |
| | agonists | 428 | Halofenozide |
| | | 429 | Methoxyfenozide |
| | | 430 | Tebufenozide |
| II36 | Octopamine | 431 | Amitraz |
| | receptor agonists | | |
| II37 | Mitochondrial | 432 | Hydramethylnon |
| | complex III | 433 | Acequinocyl |
| | electron | 434 | Fluacrypyrim |
| | transport | 435 | Bifenazate |
| | inhibitors | | |
| II38 | Mitochondrial | 436 | Meti acaricides |
| | complex I | 437 | Meti insecticides |
| | electron | 438 | Fenazaquin |
| | transport | 439 | Fenpyroximate |
| | inhibitors | 440 | Pyrimidifen |
| | | 441 | Pyridaben |
| | | 442 | Tebufenpyrad |
| | | 443 | Tolfenpyrad |
| | | 444 | Rotenone |
| II39 | Voltage- | 445 | Oxadiazines |
| | dependent | 446 | Indoxacarb |
| | sodium channel | 447 | Semicarbazones |
| | blockers | 448 | Metaflumizone |
| II40 | Inhibitors of | 449 | Tetronic derivatives |
| | acetyl co- | 450 | Tetramic acid derivatives |
| | enzyme A | 451 | Spirodiclofen |
| | carboxylase | 452 | Spiromesifen |
| | | 453 | Spiropidion |
| | | 454 | Spirotetramat |
| II41 | Mitochondrial | 455 | Phosphides |
| | complex IV | 456 | Aluminum phosphide |
| | electron | 457 | Calcium phosphide |
| | transport | 458 | Phosphine |
| | inhibitors | 459 | Zinc phosphide |
| | | 460 | Cyanides |
| | | 461 | Calcium cyanide |
| | | 462 | Potassium cyanide |
| | | 463 | Sodium cyanide |
| II42 | Mitochondrial | 464 | Beta-ketonitrile derivatives |
| | complex | 465 | Cyenopyrafen |
| | II electron | 466 | Cyflumetofen |
| | transport | 467 | Carboxanilides |
| | inhibitors | 468 | Pyflubumide |
| II43 | Ryanodine | 469 | Diamides |
| | receptor | 470 | Chlorantraniliprole |
| | modulators | 471 | Cyantraniliprole |
| | | 472 | Cyclaniliprole |
| | | 473 | Flubendiamide |
| | | 474 | Tetraniliprole |
| II44 | Chordotonal | 475 | Flonicamid |
| | organ | | |
| | modulators- | | |
| | undefined target | | |
| | site | | |
| II45 | GABA-gated | 476 | Meta-diamides |
| | chloride channel | 477 | Isoxazolines |
| | allosteric | 478 | Broflanilide |
| | modulators | 479 | Fluxametamide |

[0850] In some embodiments, a mixture of the present invention may comprise, consist essentially of, or consist of, one or more CRIPs selected from Table A, or combination thereof, and one or more Insecticidal Agents (IAs) selected from Table B, or combination thereof.

[0851] In some embodiments, a mixture of the present invention may comprise, consist essentially of, or consist of, one or more CRIPs selected from any one of CRIP Groups I1; I2; I3; I4; I5; I6; I7, or combination thereof; combined with any one or more IAs in IA Groups II1; II2; II3; II4; II5; II6; II7; II8; II9; II10; II11; II12; II13; II14; II15; II16; II17; II18; II19; II20; II21; II22; II23; II24; II25; II26; II27; II28; II29; II30; II31; II32; II33; 1134; II35; II36; II37; II38; II39; II40; II41; II42; II43; II44; II45, or combination thereof.

[0852] In some embodiments, a mixture of the present invention may comprise, consist essentially of, or consist of, a CRIP selected from: A1; A2; A3; A4; A5; A6; A7; A8; A9; A10; A11; A12; A13; A14; A15; A16; A17; A18; A19; A20; A21; A22; A23; A24; A25; A26; A27; A28; A29; A30; A31; A32; A33; A34; A35; A36; A37; A38; A39; A40; A41; A42; A43; A44; A45; A46; A47; A48; A49; A50; A51; A52; A53; A54; A55; A56; A57; A58; A59; A60; A61; A62; A63; A64; A65; A66; A67; A68; or a combination thereof; combined with an IA selected from: B1; B2; B3; B4; B5; B6; B7; B8; B9; B10; B11; B12; B13; B14; B15; B16; B17; B18; B19; B20; B21; B22; B23; B24; B25; B26; B27; B28; B29; B30; B31; B32; B33; B34; B35; B36; B37; B38; B39; B40; B41; B42; B43; B44; B45; B46; B47; B48; B49; B50; B51; B52; B53; B54; B55; B56; B57; B58; B59; B60; B61; B62; B63; B64; B65; B66; B67; B68; B69; B70; B71; B72; B73; B74; B75; B76; B77; B78; B79; B80; B81; B82; B83; B84; B85; B86; B87; B88; B89; B90; B91; B92; B93; B94; B95; B96; B97; B98; B99; B100; B101; B102; B103; B104; B105; B106; B107; B108; B109; B110; B111; B112; B113; B114; B115; B116; B117; B118; B119; B120; B121; B122; B123; B124; B125; B126; B127; B128; B129; B130; B131; B132; B133; B134; B135; B136; B137; B138; B139; B140; B141; B142; B143; B144; B145; B146; B147; B148; B149; B150; B151; B152; B153; B154; B155; B156; B157; B158; B159; B160; B161; B162; B163; B164; B165; B166; B167; B168; B169; B170; B171; B172; B173; B174; B175; B176; B177; B178; B179; B180; B181;

[0853] B182; B183; B184; B185; B186; B187; B188; B189; B190; B191; B192; B193; B194; B195; B196; B197; B198; B199; B200; B201; B202; B203; B204; B205; B206; B207; B208; B209; B210; B211; B212; B213; B214; B215; B216; B217; B218; B219; B220; B221; B222; B223; B224; B225; B226; B227; B228; B229; B230; B231; B232; B233; B234; B235; B236; B237; B238; B239; B240; B241; B242; B243; B244; B245; B246; B247; B248; B249; B250; B251; B252; B253; B254; B255; B256; B257; B258; B259; B260; B261; B262; B263; B264; B265; B266; B267; B268; B269; B270; B271; B272; B273; B274; B275; B276; B277; B278; B279; B280; B281; B282; B283; B284; B285; B286; B287; B288; B289; B290; B291; B292; B293; B294; B295; B296; B297; B298; B299; B300; B301; B302; B303; B304; B305; B306; B307; B308; B309; B310; B311; B312; B313; B314; B315; B316; B317; B318; B319; B320; B321; B322; B323; B324; B325; B326; B327; B328; B329; B330; B331; B332; B333; B334; B335; B336; B337; B338; B339; B340; B341; B342; B343; B344; B345; B346; B347; B348; B349; B350; B351; B352; B353; B354; B355; B356; B357; B358; B359; B360; B361; B362; B363; B364; B365; B366; B367; B368; B369; B370; B371; B372; B373; B374; B375; B376; B377; B378; B379; B380; B381; B382; B383; B384; B385; B386; B387; B388; B389; B390; B391; B392; B393; B394; B395; B396; B397; B398; B399; B400; B401; B402; B403; B404; B405; B406; B407; B408; B409; B410; B411; B412; B413; B414; B415; B416; B417; B418; B419; B420; B421; B422; B423; B424; B425; B426; B427; B428; B429; B430; B431; B432; B433; B434; B435; B436; B437; B438; B439; B440; B441; B442; B443; B444; B445; B446; B447; B448; B449; B450; B451; B452; B453; B454; B455; B456; B457; B458; B459; B460; B461; B462; B463; B464; B465; B466; B467; B468; B469; B470; B471; B472; B473; B474; B475; B476; B477; B478; B479; or a combination thereof.

[0854] In some embodiments, a mixture of the present invention may comprise, consist essentially of, or consist of, the CRIP A1 from Table A, combined with any one or more Insecticidal Agents (IAs) selected from the group consisting of B1-B479, in Table B.

[0855] In some embodiments, a mixture of the present invention may comprise, consist essentially of, or consist of, the CRIP A2 from Table A, combined with any one or more Insecticidal Agents (IAs) selected from the group consisting of B1-B479, in Table B.

[0856] In some embodiments, a mixture of the present invention may comprise, consist essentially of, or consist of, the CRIP A3 from Table A, combined with any one or more Insecticidal Agents (IAs) selected from the group consisting of B1-B479, in Table B.

[0857] In some embodiments, a mixture of the present invention may comprise, consist essentially of, or consist of, the CRIP A4 from Table A, combined with any one or more Insecticidal Agents (IAs) selected from the group consisting of B1-B479, in Table B.

[0858] In some embodiments, a mixture of the present invention may comprise, consist essentially of, or consist of, the CRIP A5 from Table A, combined with any one or more Insecticidal Agents (IAs) selected from the group consisting of B1-B479, in Table B.

[0859] In some embodiments, a mixture of the present invention may comprise, consist essentially of, or consist of, the CRIP A6 from Table A, combined with any one or more Insecticidal Agents (IAs) selected from the group consisting of B1-B479, in Table B.

[0860] In some embodiments, a mixture of the present invention may comprise, consist essentially of, or consist of, the CRIP A7 from Table A, combined with any one or more Insecticidal Agents (IAs) selected from the group consisting of B1-B479, in Table B.

[0861] In some embodiments, a mixture of the present invention may comprise, consist essentially of, or consist of, the CRIP A8 from Table A, combined with any one or more Insecticidal Agents (IAs) selected from the group consisting of B1-B479, in Table B.

[0862] In some embodiments, a mixture of the present invention may comprise, consist essentially of, or consist of, the CRIP A9 from Table A, combined with any one or more Insecticidal Agents (IAs) selected from the group consisting of B1-B479, in Table B.

[0863] In some embodiments, a mixture of the present invention may comprise, consist essentially of, or consist of, the CRIP A10 from Table A, combined with any one or more Insecticidal Agents (IAs) selected from the group consisting of B1-B479, in Table B.

[0864] In some embodiments, a mixture of the present invention may comprise, consist essentially of, or consist of, the CRIP A11 from Table A, combined with any one or more Insecticidal Agents (IAs) selected from the group consisting of B1-B479, in Table B.

[0865] In some embodiments, a mixture of the present invention may comprise, consist essentially of, or consist of, the CRIP A12 from Table A, combined with any one or more Insecticidal Agents (IAs) selected from the group consisting of B1-B479, in Table B.

[0866] In some embodiments, a mixture of the present invention may comprise, consist essentially of, or consist of, the CRIP A13 from Table A, combined with any one or more Insecticidal Agents (IAs) selected from the group consisting of B1-B479, in Table B.

[0867] In some embodiments, a mixture of the present invention may comprise, consist essentially of, or consist of, the CRIP A14 from Table A, combined with any one or more Insecticidal Agents (IAs) selected from the group consisting of B1-B479, in Table B.

[0868] In some embodiments, a mixture of the present invention may comprise, consist essentially of, or consist of, the CRIP A15 from Table A, combined with any one or more Insecticidal Agents (IAs) selected from the group consisting of B1-B479, in Table B.

[0869] In some embodiments, a mixture of the present invention may comprise, consist essentially of, or consist of, the CRIP A16 from Table A, combined with any one or more Insecticidal Agents (IAs) selected from the group consisting of B1-B479, in Table B.

[0870] In some embodiments, a mixture of the present invention may comprise, consist essentially of, or consist of, the CRIP A17 from Table A, combined with any one or more Insecticidal Agents (IAs) selected from the group consisting of B1-B479, in Table B.

[0871] In some embodiments, a mixture of the present invention may comprise, consist essentially of, or consist of, the CRIP A18 from Table A, combined with any one or more Insecticidal Agents (IAs) selected from the group consisting of B1-B479, in Table B.

[0872] In some embodiments, a mixture of the present invention may comprise, consist essentially of, or consist of, the CRIP A19 from Table A, combined with any one or more Insecticidal Agents (IAs) selected from the group consisting of B1-B479, in Table B.

[0873] In some embodiments, a mixture of the present invention may comprise, consist essentially of, or consist of, the CRIP A20 from Table A, combined with any one or more Insecticidal Agents (IAs) selected from the group consisting of B1-B479, in Table B.

[0874] In some embodiments, a mixture of the present invention may comprise, consist essentially of, or consist of, the CRIP A21 from Table A, combined with any one or more Insecticidal Agents (IAs) selected from the group consisting of B1-B479, in Table B.

[0875] In some embodiments, a mixture of the present invention may comprise, consist essentially of, or consist of, the CRIP A22 from Table A, combined with any one or more Insecticidal Agents (IAs) selected from the group consisting of B1-B479, in Table B.

[0876] In some embodiments, a mixture of the present invention may comprise, consist essentially of, or consist of, the CRIP A23 from Table A, combined with any one or more Insecticidal Agents (IAs) selected from the group consisting of B1-B479, in Table B.

[0877] In some embodiments, a mixture of the present invention may comprise, consist essentially of, or consist of, the CRIP A24 from Table A, combined with any one or more Insecticidal Agents (IAs) selected from the group consisting of B1-B479, in Table B.

[0878] In some embodiments, a mixture of the present invention may comprise, consist essentially of, or consist of, the CRIP A25 from Table A, combined with any one or more Insecticidal Agents (IAs) selected from the group consisting of B1-B479, in Table B.

[0879] In some embodiments, a mixture of the present invention may comprise, consist essentially of, or consist of, the CRIP A26 from Table A, combined with any one or more Insecticidal Agents (IAs) selected from the group consisting of B1-B479, in Table B.

[0880] In some embodiments, a mixture of the present invention may comprise, consist essentially of, or consist of, the CRIP A27 from Table A, combined with any one or more Insecticidal Agents (IAs) selected from the group consisting of B1-B479, in Table B.

[0881] In some embodiments, a mixture of the present invention may comprise, consist essentially of, or consist of, the CRIP A28 from Table A, combined with any one or more Insecticidal Agents (IAs) selected from the group consisting of B1-B479, in Table B.

[0882] In some embodiments, a mixture of the present invention may comprise, consist essentially of, or consist of, the CRIP A29 from Table A, combined with any one or more Insecticidal Agents (IAs) selected from the group consisting of B1-B479, in Table B.

[0883] In some embodiments, a mixture of the present invention may comprise, consist essentially of, or consist of, the CRIP A30 from Table A, combined with any one or more Insecticidal Agents (IAs) selected from the group consisting of B1-B479, in Table B.

[0884] In some embodiments, a mixture of the present invention may comprise, consist essentially of, or consist of, the CRIP A31 from Table A, combined with any one or more Insecticidal Agents (IAs) selected from the group consisting of B1-B479, in Table B.

[0885] In some embodiments, a mixture of the present invention may comprise, consist essentially of, or consist of, the CRIP A32 from Table A, combined with any one or more Insecticidal Agents (IAs) selected from the group consisting of B1-B479, in Table B.

[0886] In some embodiments, a mixture of the present invention may comprise, consist essentially of, or consist of, the CRIP A33 from Table A, combined with any one or more Insecticidal Agents (IAs) selected from the group consisting of B1-B479, in Table B.

[0887] In some embodiments, a mixture of the present invention may comprise, consist essentially of, or consist of, the CRIP A34 from Table A, combined with any one or more Insecticidal Agents (IAs) selected from the group consisting of B1-B479, in Table B.

[0888] In some embodiments, a mixture of the present invention may comprise, consist essentially of, or consist of, a CRIP from Table A selected from: A1; A2; A3; A4; A5; A6; A7; A8; A9; A10; A11; A12; A13; A14; A15; A16; A17; A18; A19; A20; A21; A22; A23; A24; A25; A26; A27; A28; A29; A30; A31; A32; A33; A34; A35; A36; A37; A38; A39; A40; A41; A42; A43; A44; A45; A46; A47; A48; A49; A50; A51; A52; A53; A54; A55; A56; A57; A58; A59; A60; A61; A62; A63; A64; A65; A66; A67; or A68; wherein said CRIP is at least 50% identical, at least 55% identical, at least 60% identical, at least 65% identical, at least 70% identical, at least 75% identical, at least 80% identical, at least 81% identical, at least 82% identical, at least 83% identical, at least 84% identical, at least 85% identical, at least 86% identical, at least 87% identical, at least 88% identical, at least 89% identical, at least 90% identical, at least 91% identical, at least 92% identical, at least 93% identical, at least 94% identical, at least 95% identical, at least 96% identical, at least 97% identical, at least 98% identical, at least 99% identical, at least 99.5% identical, at least 99.6% identical, at least 99.7% identical, at least 99.8% identical, at least 99.9% identical, or 100% identical to an amino acid sequences set forth in 1; 2; 3; 4; 5; 6; 7; 8; 9; 10; 11; 12; 13; 14; 15; 49; 50; 51; 52; 53; 621; 622; 623; 624; 625; 626; 627; 628; 629; 630; 631; 632; 633; 634; 635; 636; 637; 638; 639; 640; 641; 642; 643; 644; 645; 646; 647; 648; 649; 650; 651; 652; 653; 654; 66; 88; 588; 44; 45; 46; 47; 60; 61; 62; 63; 64; 594; or 65, respectively.

[0889] In some embodiments, a mixture of the present invention may comprise, consist essentially of, or consist of, a CRIP and an IA; wherein the CRIP peptide may comprise, consist essentially of, or consist of, an amino acid sequence having at least 50%, at least 55%, at least 60%, at least 65%, at least 70%, at least 75%, at least 80%, at least 81%, at least 82%, at least 83%, at least 84%, at least 85%, at least 86%, at least 87%, at least 88%, at least 89%, at least 90%, at least 91%, at least 92%, at least 93%, at least 94%, at least 95%, at least 96%, at least 97%, at least 98%, at least 99%, at least 99.5%, at least 99.6%, at least 99.7%, at least 99.8%, at least 99.9%, or 100% amino acid sequence identity to: a spider peptide having an amino acid sequence as set forth in any one of SEQ ID NOs: 192-370; an ACTX peptide (e.g., U-ACTX-Hv1a, U+2-ACTX-Hv1a, rU-ACTX-Hv1a, rU-ACTX-Hy1b, K-ACTX-Hy1a, κ+2-ACTX-Hv1a, ω-ACTX-Hv1a, and/or ω+2-ACTX-Hy1a) having an amino acid sequence as set forth in any one of SEQ ID NOs: 60-64, 192-370 and 594; an F-CNTX-Pn1a having an amino acid sequence as set forth in any one of SEQ ID NO: 65; a U1-agatoxin-Ta1b peptide having an amino acid sequence as set forth in SEQ ID NO: 1; a U1-agatoxin-Ta1b Variant Polypeptide (TVP) having an amino acid sequence as set forth in any one of SEQ ID NOs: 2-15, 49-53, 2-15, 49-53, 621-622, 624-628, 631-640, 642-651, or 653-654; a scorpion peptide having an amino acid sequence as set forth in any one of SEQ ID NOs: 66, 88-191; a sea anemone peptide having an amino acid sequence as set forth in any one of SEQ ID NOs: 371-411; an Av3 polypeptide from Anemonia viridis having an amino acid sequence as set forth in SEQ ID NO:44; an Av3 variant polypeptide (AVP) having an amino acid sequence as set forth in any one of SEQ ID NOs: 45-47; or a conotoxin; and wherein the IA is an IA listed in Table B, and wherein the IA is B1; B2; B3; B4; B5; B6; B7; B8; B9; B10; B11; B12; B13; B14; B15; B16; B17; B18; B19; B20; B21; B22; B23; B24; B25; B26; B27; B28; B29; B30; B31; B32; B33; B34; B35; B36; B37; B38; B39; B40; B41; B42; B43; B44; B45; B46; B47; B48; B49; B50; B51; B52; B53; B54; B55; B56; B57; B58; B59; B60; B61; B62; B63; B64; B65; B66; B67; B68; B69; B70; B71; B72; B73; B74; B75;

[0890] B76; B77; B78; B79; B80; B81; B82; B83; B84; B85; B86; B87; B88; B89; B90; B91; B92; B93; B94; B95; B96; B97; B98; B99; B100; B101; B102; B103; B104; B105; B106; B107; B108; B109; B110; B111; B112; B113; B114; B115; B116; B117; B118; B119; B120; B121; B122; B123; B124; B125; B126; B127; B128; B129; B130; B131; B132; B133; B134; B135; B136; B137; B138; B139; B140; B141; B142; B143; B144; B145; B146; B147; B148; B149; B150; B151; B152; B153; B154; B155; B156; B157; B158; B159; B160; B161; B162; B163; B164; B165; B166; B167; B168; B169; B170; B171; B172; B173; B174; B175; B176; B177; B178; B179; B180; B181; B182; B183; B184; B185; B186; B187; B188; B189; B190; B191; B192; B193; B194; B195; B196; B197; B198; B199; B200; B201; B202; B203; B204; B205; B206; B207; B208; B209; B210; B211; B212; B213; B214; B215; B216; B217; B218; B219; B220; B221; B222; B223; B224; B225; B226; B227; B228; B229; B230; B231; B232; B233; B234; B235; B236; B237; B238; B239; B240; B241; B242; B243; B244; B245; B246; B247; B248; B249; B250; B251; B252; B253; B254; B255; B256; B257; B258; B259; B260; B261; B262; B263; B264; B265; B266; B267; B268; B269; B270; B271; B272; B273; B274; B275; B276; B277; B278; B279; B280; B281; B282; B283; B284; B285; B286; B287; B288; B289; B290; B291; B292; B293; B294; B295; B296; B297; B298; B299; B300; B301; B302; B303; B304; B305; B306; B307; B308; B309; B310; B311; B312; B313; B314; B315; B316; B317; B318; B319; B320; B321; B322; B323; B324; B325; B326; B327; B328; B329; B330; B331; B332; B333; B334; B335; B336; B337; B338; B339; B340; B341; B342; B343; B344; B345; B346; B347; B348; B349; B350; B351; B352; B353; B354; B355; B356; B357; B358; B359; B360; B361; B362; B363; B364; B365; B366; B367; B368; B369; B370; B371; B372; B373; B374; B375; B376; B377; B378; B379; B380; B381; B382; B383; B384; B385; B386; B387; B388; B389; B390; B391; B392; B393; B394; B395; B396; B397; B398; B399; B400; B401; B402; B403; B404; B405; B406; B407; B408; B409; B410; B411; B412; B413; B414; B415; B416; B417; B418; B419; B420; B421; B422; B423; B424; B425; B426; B427; B428; B429; B430; B431; B432; B433; B434; B435; B436; B437; B438; B439; B440; B441; B442; B443; B444; B445; B446; B447; B448; B449; B450; B451; B452; B453; B454; B455; B456; B457; B458; B459; B460; B461; B462; B463; B464; B465; B466; B467; B468; B469; B470; B471; B472; B473; B474; B475; B476; B477; B478; B479; or a combination thereof.

[0891] In some embodiments, the ratio of CRIP to IA, on a dry weight basis, can be selected from at least about the following ratios: 10,000:1, 5,000:1, 1,000:1, 500:1, 250:1, 200:1, 100:1, 99:1, 95:5, 90:10, 85:15, 80:20, 75:25, 70:30, 65:35, 60:40, 55:45, 1:1, 45:55, 40:60, 35:65, 30:70, 25:75, 20:80, 15:85, 10:90, 5:95, 1:99, 1:100, 1:200, 1:250, 1:500, 1:1,000, 1:5,000, or 1:10,000, or any combination of any two of these values. The total concentration of CRIP and IA in the mixture is selected from the following percent concentrations: 0, 1, 5, 10, 15, 20, 25, 30, 35, 40, 45, 50, 55, 60, 65, 70, 75, 80, 85, 90, 95, 99 or 100%, or any range between any two of these values, and the remaining percentage of the mixture is comprised of excipients.

[0892] Any of the foregoing mixtures, compositions, or formulations comprising one or more CRIPs and one or more IAs as described herein, can further comprise, consist essentially of, or consist of, an excipient.

[0893] Any of the foregoing mixtures or compositions comprising one or more CRIPs and one or more IAs can be applied concomitantly and/or sequentially, and either in the same or separate compositions. The ratios of CRIP to IA will depend on the insect pest to be targeted, and the needs of the user.

[0894] Furthermore, any of the foregoing mixtures or compositions comprising one or more CRIPs and one or more IAs, can be can be applied to the crop area or plant to be treated, simultaneously or in succession, with other compounds. For example, in some embodiments, these other compounds can be fertilizers, weed killers, cryoprotectants, surfactants, detergents, pesticidal soaps, dormant oils, polymers, and/or time-release or biodegradable carrier formulations that permit long-term dosing of a target area following a single application of the formulation. The other compounds can also be selective herbicides, chemical insecticides, virucides, microbicides, amoebicides, pesticides, fungicides, bacteriocides, nematocides, molluscicides or mixtures of several of these preparations, if desired, together with further agriculturally acceptable carriers, surfactants or application-promoting adjuvants customarily employed in the art of formulation. In some embodiments, suitable carriers and adjuvants can be solid or liquid, and correspond to the substances ordinarily employed in formulation technology, e.g. natural or regenerated mineral substances, solvents, dispersants, wetting agents, tackifiers, binders or fertilizers. Likewise, any of the foregoing mixtures, compositions, or formulations may be prepared into edible “baits” or fashioned into pest “traps” to permit feeding or ingestion by a target pest of the pesticidal formulation.

[0895] Compositions and Formulations

[0896] As used herein, the terms “composition” and “formulations” are used interchangeably.

[0897] % v/v; % w/w; and % w/v

[0898] As used herein, “v/v” or “% v/v” or “volume per volume” refers to the volume concentration of a solution (“v/v” stands for volume per volume). Here, v/v can be used when both components of a solution are liquids. For example, when 50 mL of ingredient X is diluted with 50 mL of water, there will be 50 mL of ingredient X in a total volume of 100 mL; therefore, this can be expressed as “ingredient X 50% v/v.” Percent volume per volume (% v/v) is calculated as follows: (volume of solute (mL)/volume of solution (100 mL)); e.g., % v/v=mL of solute/100 mL of solution.

[0899] As used herein, “w/w” or “% w/w” or “weight per weight” or “wt/wt” or “% wt/wt” refers to the weight concentration of a formulation or solution, i.e., percent weight in weight (“w/w” stands for weight per weight). Here, w/w expresses the number of grams (g) of a constituent in 100 g of solution or mixture. For example, a mixture consisting of 30 g of ingredient X, and 70 g of water would be expressed as “ingredient X 30% w/w.” Percent weight per weight (% w/w) is calculated as follows: (weight of solute (g)/weight of solution (g))×100; or (mass of solute (g)/mass of solution (g))×100.

[0900] As used herein, “w/v” or “% w/v” or “weight per volume” refers to the mass concentration of a solution, i.e., percent weight in volume (“w/v” stands for weight per volume). Here, w/v expresses the number of grams (g) of a constituent in 100 mL of solution. For example, if 1 g of ingredient X is used to make up a total volume of 100 mL, then a “1% w/v solution of ingredient X” has been made. Percent weight per volume (% w/v) is calculated as follows: (Mass of solute (g)/Volume of solution (mL))×100.

[0901] Compositions comprising, consisting essentially of, or consisting of a (1) CRIP, a CRIP-insecticidal protein, a pharmaceutically acceptable salt thereof, or a combination thereof; and (2) one or more Insecticidal Agents, for example, agrochemical compositions, can include, but are not limited to, aerosols and/or aerosolized products, e.g., sprays, fumigants, powders, dusts, and/or gases; seed dressings; oral preparations (e.g., insect food, etc.); transgenic organisms expressing and/or producing a TVP, a TVP-insecticidal protein, and/or a TVP ORF (either transiently and/or stably), e.g., a plant or an animal.

[0902] The composition may be formulated as a powder, dust, pellet, granule, spray, emulsion, colloid, solution, or such like, and may be prepared by such conventional means as desiccation, lyophilization, homogenization, extraction, filtration, centrifugation, sedimentation, or concentration of a culture of cells comprising the polypeptide. In all such compositions that contain at least one such pesticidal polypeptide, the polypeptide may be present in a concentration of from about 1% to about 99% by weight.

[0903] In some embodiments, the pesticide compositions described herein may be made by formulating either the CRIP, CRIP-insecticidal protein, or pharmaceutically acceptable salt thereof, with the desired agriculturally-acceptable carrier. The compositions may be formulated prior to administration in an appropriate means such as lyophilized, freeze-dried, desiccated, or in an aqueous carrier, medium or suitable diluent, such as saline and/or other buffer. In some embodiments, the formulated compositions may be in the form of a dust or granular material, or a suspension in oil (vegetable or mineral), or water or oil/water emulsions, or as a wettable powder, or in combination with any other carrier material suitable for agricultural application. Suitable agricultural carriers can be solid or liquid and are well known in the art. In some embodiments, the formulations may be mixed with one or more solid or liquid adjuvants and prepared by various means, e.g., by homogeneously mixing, blending and/or grinding the pesticidal composition with suitable adjuvants using conventional formulation techniques. Suitable formulations and application methods are described in U.S. Pat. No. 6,468,523, the disclosure of which is incorporated by reference herein in its entirety.

[0904] In some embodiments, the composition comprises, consists essentially of, or consists of: a CRIP, or pharmaceutically acceptable salt thereof; an Insecticidal Agent; and an excipient.

[0905] In some embodiments, the composition comprises, consists essentially of, or consists of: a CRIP-insecticidal protein, or pharmaceutically acceptable salt thereof; an Insecticidal Agent; and an excipient.

[0906] In some embodiments, the composition comprises, consists essentially of, or consists of: (1) a CRIP, or pharmaceutically acceptable salt thereof; a CRIP-insecticidal protein, or pharmaceutically acceptable salt thereof; or a combination thereof; (2) one or more Insecticidal Agents; and (3) an excipient.

[0907] Pharmaceutically Acceptable Salts

[0908] As used herein, the term “pharmaceutically acceptable salt” and “agriculturally acceptable salt” are synonymous. In some embodiments, pharmaceutically acceptable salts, hydrates, solvates, crystal forms and individual isomers, enantiomers, tautomers, diastereomers and prodrugs of the CRIPs, CRIP-insecticidal proteins, and/or Insecticidal Agents described herein, and where applicable can be utilized.

[0909] In some embodiments, a pharmaceutically acceptable salt of the present invention possesses the desired pharmacological activity of the parent compound. Such salts include: acid addition salts, formed with inorganic acids; acid addition salts formed with organic acids; or salts formed when an acidic proton present in the parent compound is replaced by a metal ion, e.g., an alkali metal ion, aluminum ion; or coordinates with an organic base such as ethanolamine, and the like.

[0910] In some embodiments, pharmaceutically acceptable salts include conventional toxic or non-toxic salts. For example, in some embodiments, convention non-toxic salts include those such as fumarate, phosphate, citrate, chlorydrate, and the like. In some embodiments, the pharmaceutically acceptable salts of the present invention can be synthesized from a parent compound by conventional chemical methods. In some embodiments, such salts can be prepared by reacting the free acid or base forms of these compounds with a stoichiometric amount of the appropriate base or acid in water or in an organic solvent, or in a mixture of the two. In some embodiments, non-aqueous media like ether, ethyl acetate, ethanol, isopropanol, or acetonitrile are preferred. Lists of suitable salts are found in Remington's Pharmaceutical Sciences, 17th ed., Mack Publishing Company, Easton, Pa., 1985, p. 1418, the disclosure of which is incorporated herein by reference in its entirety.

[0911] In some embodiments, a pharmaceutically acceptable salt can be one of the following: hydrochloride; sodium; sulfate; acetate; phosphate or diphosphate; chloride; potassium; maleate; calcium; citrate; mesylate; nitrate; tartrate; aluminum; or gluconate.

[0912] In some embodiments, a list of pharmaceutically acceptable acids that can be used to form salts can be: glycolic acid; hippuric acid; hydrobromic acid; hydrochloric acid; isobutyric acid; lactic acid (DL); lactobionic acid; lauric acid; maleic acid; malic acid (−L); malonic acid; mandelic acid (DL); methanesulfonic acid; naphthalene-1,5-disulfonic acid; naphthalene-2-sulfonic acid; nicotinic acid; nitric acid; oleic acid; oxalic acid; palmitic acid; pamoic acid; phosphoric acid; proprionic acid; pyroglutamic acid (−L); salicylic acid; sebacic acid; stearic acid; succinic acid; sulfuric acid; tartaric acid (+L); thiocyanic acid; toluenesulfonic acid (p); undecylenic acid; a 1-hydroxy-2-naphthoic acid; 2,2-dichloroacetic acid; 2-hydroxyethanesulfonic acid; 2-oxoglutaric acid; 4-acetamidobenzoic acid; 4-aminosalicylic acid; acetic acid; adipic acid; ascorbic acid (L); aspartic acid (L); benzenesulfonic acid; benzoic acid; camphoric acid (+); camphor-10-sulfonic acid (+); capric acid (decanoic acid); caproic acid (hexanoic acid); caprylic acid (octanoic acid); carbonic acid; cinnamic acid; citric acid; cyclamic acid; dodecylsulfuric acid; ethane-1,2-disulfonic acid; ethanesulfonic acid; formic acid; fumaric acid; galactaric acid; gentisic acid; glucoheptonic acid (D); gluconic acid (D); glucuronic acid (D); glutamic acid; glutaric acid; or glycerophosphoric acid.

[0913] In some embodiments, pharmaceutically acceptable salt can be any organic or inorganic addition salt.

[0914] In some embodiments, the salt may use an inorganic acid and an organic acid as a free acid. The inorganic acid may be hydrochloric acid, bromic acid, nitric acid, sulfuric acid, perchloric acid, phosphoric acid, etc. The organic acid may be citric acid, acetic acid, lactic acid, maleic acid, fumaric acid, gluconic acid, methane sulfonic acid, gluconic acid, succinic acid, tartaric acid, galacturonic acid, embonic acid, glutamic acid, aspartic acid, oxalic acid, (D) or (L) malic acid, maleic acid, methane sulfonic acid, ethane sulfonic acid, 4-toluene sulfonic acid, salicylic acid, citric acid, benzoic acid, malonic acid, etc.

[0915] In some embodiments, the salts include alkali metal salts (sodium salts, potassium salts, etc.) and alkaline earth metal salts (calcium salts, magnesium salts, etc.). For example, the acid addition salt may include acetate, aspartate, benzoate, besylate, bicarbonate/carbonate, bisulfate/sulfate, borate, camsylate, citrate, edisilate, esylate, formate, fumarate, gluceptate, gluconate, glucuronate, hexafluorophosphate, hibenzate, hydrochloride/chloride, hydrobromide/bromide, hydroiodide/iodide, isethionate, lactate, malate, maleate, malonate, mesylate, methyl sulfate, naphthalate, 2-napsylate, nicotinate, nitrate, orotate, oxalate, palmitate, pamoate, phosphate/hydrogen phosphate/dihydrogen phosphate, saccharate, stearate, succinate, tartrate, tosylate, trifluoroacetate, aluminum, arginine, benzathine, calcium, choline, diethylamine, diolamine, glycine, lysine, magnesium, meglumine, olamine, potassium, sodium, tromethamine, zinc salt, etc., and among them, hydrochloride or trifluoroacetate may be used.

[0916] In yet other embodiments, the pharmaceutically acceptable salt can be a salt with an acid such as acetic acid, propionic acid, butyric acid, formic acid, trifluoroacetic acid, maleic acid, tartaric acid, citric acid, stearic acid, succinic acid, ethylsuccinic acid, lactobionic acid, gluconic acid, glucoheptonic acid, benzoic acid, methanesulfonic acid, ethanesulfonic acid, 2-hydroxyethanesulfonic acid, benzenesulfonic acid, p-toluenesulfonic acid, laurylsulfuric acid, malic acid, aspartic acid, glutaminic acid, adipic acid, cysteine, N-acetylcysteine, hydrochloric acid, hydrobromic acid, phosphoric acid, sulfuric acid, hydroiodic acid, nicotinic acid, oxalic acid, picric acid, thiocyanic acid, undecanoic acid, polyacrylate or carboxyvinyl polymer.

[0917] In some embodiments, the pharmaceutically acceptable salt can be prepared from either inorganic or organic bases. Salts derived from inorganic bases include, but are not limited to, the sodium, potassium, lithium, ammonium, calcium, magnesium, ferrous, zinc, copper, manganous, aluminum, ferric, manganic salts, and the like. Preferred inorganic salts are the ammonium, sodium, potassium, calcium, and magnesium salts. Salts derived from organic bases include, but are not limited to, salts of primary, secondary, and tertiary amines, substituted amines including naturally-occurring substituted amines, and cyclic amines, including isopropylamine, trimethylamine, diethylamine, triethylamine, tripropylamine, ethanolamine, 2-dimethylaminoethanol, tromethamine, lysine, arginine, histidine, caffeine, procaine, hydrabamine, choline, betaine, ethylenediamine, glucosamine, N-alkylglucamines, theobromine, purines, piperazine, piperidine, N-ethylpiperidine, and the like. Preferred organic bases are isopropylamine, diethylamine, ethanolamine, piperidine, tromethamine, and choline.

[0918] In some embodiments, pharmaceutically acceptable salt refers to those salts which are, within the scope of sound medical judgment, suitable for use in contact with the tissues of humans and lower animals without undue toxicity, irritation, allergic response and the like, and are commensurate with a reasonable benefit/risk ratio. Pharmaceutically acceptable salts are well known in the art. For example, S. M. Berge, et al. describe pharmaceutically acceptable salts in detail in J. Pharmaceutical Sciences, 66: 1-19 (1977), the disclosure of which is incorporated herein by reference in its entirety.

[0919] In some embodiments, the salts of the present invention can be prepared in situ during the final isolation and purification of the compounds of the invention, or separately by reacting the free base function with a suitable organic acid. Examples of pharmaceutically acceptable, nontoxic acid addition salts are salts of an amino group formed with inorganic acids such as hydrochloric acid, hydrobromic acid, phosphoric acid, sulfuric acid and perchloric acid or with organic acids such as acetic acid, oxalic acid, maleic acid, tartaric acid, citric acid, succinic acid or malonic acid or by using other methods used in the art such as ion exchange. Other pharmaceutically acceptable salts include adipate, alginate, ascorbate, aspartate, benzenesulfonate, benzoate, bisulfate, borate, butyrate, camphorate, camphorsulfonate, citrate, cyclopentanepropionate, digluconate, dodecylsulfate, ethanesulfonate, formate, fumarate, glucoheptonate, glycerophosphate, gluconate, hemisulfate, heptanoate, hexanoate, hydroiodide, 2-hydroxy-ethanesulfonate, lactobionate, lactate, laurate, lauryl sulfate, malate, maleate, malonate, methanesulfonate, 2-naphthalenesulfonate, nicotinate, nitrate, oleate, oxalate, palmitate, pamoate, pectinate, persulfate, 3-phenylpropionate, phosphate, picrate, pivalate, propionate, stearate, succinate, sulfate, tartrate, thiocyanate, p-toluenesulfonate, undecanoate, valerate salts, and the like. Representative alkali or alkaline earth metal salts include sodium, lithium, potassium, calcium, magnesium, and the like. Further pharmaceutically acceptable salts include, when appropriate, nontoxic ammonium, quaternary ammonium, and amine cations formed using counterions such as halide, hydroxide, carboxylate, sulfate, phosphate, nitrate, lower alkyl sulfonate and aryl sulfonate.

[0920] Exemplary descriptions of pharmaceutically acceptable salts is provided in P. H. Stahl and C. G. Wermuth, (editors), Handbook of Pharmaceutical Salts: Properties, Selection and Use, John Wiley & Sons, August 23, (2002), the disclosure of which is incorporated herein by reference in its entirety.

[0921] Sprayable Compositions

[0922] Examples of spray products of the present invention can include field sprayable formulations for agricultural usage and indoor sprays for use in interior spaces in a residential or commercial space. In some embodiments, residual sprays or space sprays comprising a combination of one or more of CRIPs: A1-A68, and one or more Insecticidal Agents: B1-B479, can be used to reduce or eliminate insect pests in an interior space.

[0923] Surface spraying indoors (SSI) is the technique of applying a variable volume sprayable volume of an insecticide onto indoor surfaces where vectors rest, such as on walls, windows, floors and ceilings. The primary goal of variable volume sprayable volume is to reduce the lifespan of the insect pest, (for example, a fly, a flea, a tick, or a mosquito vector) and thereby reduce or interrupt disease transmission. The secondary impact is to reduce the density of insect pests within the treatment area. SSI can be used as a method for the control of insect pest vector diseases, such as Lyme disease, Salmonella, Chikungunya virus, Zika virus, and malaria, and can also be used in the management of parasites carried by insect vectors, such as Leishmaniasis and Chagas disease. Many mosquito vectors that harbor Zika virus, Chikungunya virus, and malaria include endophilic mosquito vectors, resting inside houses after taking a blood meal. These mosquitoes are particularly susceptible to control through surface spraying indoors (SSI) with a sprayable composition comprising a combination of (1) one or more CRIPs set for the in Table A, i.e., A1-A68, (2) one or more Insecticidal Agents set forth in Table B, i.e., B1-B479, and (3) an excipient. As its name implies, SSI involves applying the composition onto the walls and other surfaces of a house with a residual insecticide.

[0924] In one embodiment, the composition comprising a combination of (1) one or more CRIPs set for the in Table A, i.e., A1-A68, (2) one or more Insecticidal Agents set forth in Table B, i.e., B1-B479, and (3) an excipient, will knock down insect pests that come in contact with these surfaces. SSI does not directly prevent people from being bitten by mosquitoes. Rather, it usually controls insect pests after they have blood fed, if they come to rest on the sprayed surface. SSI thus prevents transmission of infection to other persons. To be effective, SSI must be applied to a very high proportion of households in an area (usually greater than 40-80 percent). Therefore, sprays in accordance with the invention having good residual efficacy and acceptable odor are particularly suited as a component of integrated insect pest vector management or control solutions.

[0925] In contrast to SSI, which requires that the active CRIP, CRIP-insecticidal protein, or Insecticidal Agent be bound to surfaces of dwellings, such as walls or ceilings, as with a paint, for example, space spray products of the invention rely on the production of a large number of small insecticidal droplets intended to be distributed through a volume of air over a given period of time. When these droplets impact on a target insect pest, they deliver a knockdown effective dose of the CRIP, CRIP-insecticidal protein, or Insecticidal Agent effective to control the insect pest. The traditional methods for generating a space-spray include thermal fogging (whereby a dense cloud of a composition comprising a combination of (1) one or more CRIPs set for the in Table A, i.e., A1-A68, (2) one or more Insecticidal Agents set forth in Table B, i.e., B1-B479, and (3) an excipient, is produced giving the appearance of a thick fog) and Ultra Low Volume (ULV), whereby droplets are produced by a cold, mechanical aerosol-generating machine. Ready-to-use aerosols such as aerosol cans may also be used.

[0926] Because large areas can be treated at any one time, the foregoing method is a very effective way to rapidly reduce the population of flying insect pests in a specific area. And, because there is very limited residual activity from the application, it must be repeated at intervals of 5-7 days in order to be fully effective. This method can be particularly effective in epidemic situations where rapid reduction in insect pest numbers is required. As such, it can be used in urban dengue control campaigns.

[0927] Effective space-spraying is generally dependent upon the following specific principles. Target insects are usually flying through the spray cloud (or are sometimes impacted whilst resting on exposed surfaces). The efficiency of contact between the spray droplets and target insects is therefore crucial. This is achieved by ensuring that spray droplets remain airborne for the optimum period of time and that they contain the right dose of insecticide. These two issues are largely addressed through optimizing the droplet size. If droplets are too big they drop to the ground too quickly and don't penetrate vegetation or other obstacles encountered during application (limiting the effective area of application). If one of these big droplets impacts an individual insect then it is also “overkill,” because a high dose will be delivered per individual insect. If droplets are too small then they may either not deposit on a target insect (no impaction) due to aerodynamics or they can be carried upwards into the atmosphere by convection currents. The optimum size of droplets for space-spray application are droplets with a Volume Median Diameter (VIVID) of 10-25 microns.

[0928] In some embodiments, a sprayable composition may contain an amount of comprising a combination of one or more CRIPs set for the in Table A, i.e., A1-A68, ranging from about 0.005 wt % to about 99 wt %.

[0929] In some embodiments, a sprayable composition may contain an amount of comprising a combination of one or more Insecticidal Agents set forth in Table B, i.e., B1-B479, ranging from about 0.005 wt % to about 99 wt %.

[0930] Foams

[0931] The active compositions of the present invention comprising a combination of (1) one or more CRIPs set for the in Table A, i.e., A1-A68, (2) one or more Insecticidal Agents set forth in Table B, i.e., B1-B479, and (3) an excipient, may be made available in a spray product as an aerosol-based application, including aerosolized foam applications. Pressurized cans are the typical vehicle for the formation of aerosols. An aerosol propellant that is compatible with the CRIP, CRIP-insecticidal protein, or Insecticidal Agent used. Preferably, a liquefied-gas type propellant is used.

[0932] Suitable propellants include compressed air, carbon dioxide, butane and nitrogen. The concentration of the propellant in the active compound composition is from about 5 percent to about 40 percent by weight of the pyridine composition, preferably from about 15 percent to about 30 percent by weight of the composition comprising a combination of (1) one or more CRIPs set for the in Table A, i.e., A1-A68, (2) one or more Insecticidal Agents set forth in Table B, i.e., B1-B479, and (3) an excipient, and an excipient.

[0933] In one embodiment, formulations consisting of a TVP, a TVP-insecticidal protein, or a pharmaceutically acceptable salt thereof can also include one or more foaming agents. Foaming agents that can be used include sodium laureth sulfate, cocamide DEA, and cocamidopropyl betaine. Preferably, the sodium laureth sulfate, cocamide DEA and cocamidopropyl are used in combination. The concentration of the foaming agent(s) in the active compound composition is from about 10 percent to about 25 percent by weight, more preferably 15 percent to 20 percent by weight of the composition.

[0934] When such formulations are used in an aerosol application not containing foaming agents, the active compositions of the present invention can be used without the need for mixing directly prior to use. However, aerosol formulations containing the foaming agents do require mixing (i.e., shaking) immediately prior to use. In addition, if the formulations containing foaming agents are used for an extended time, they may require additional mixing at periodic intervals during use.

[0935] In some embodiments, a sprayable composition may contain an amount of comprising a combination of one or more CRIPs set for the in Table A, i.e., A1-A68, ranging from about 0.005 wt % to about 99 wt %.

[0936] In some embodiments, a sprayable composition may contain an amount of comprising a combination of one or more Insecticidal Agents set forth in Table B, i.e., B1-B479, ranging from about 0.005 wt % to about 99 wt %.

[0937] Burning Formulations

[0938] In some embodiments, a dwelling area may also be treated with an active CRIP, CRIP-insecticidal protein, or Insecticidal Agent composition by using a burning formulation, such as a candle, a smoke coil or a piece of incense containing the composition. For example, the composition may be formulated into household products such as “heated” air fresheners in which insecticidal compositions are released upon heating, e.g., electrically, or by burning. The active compound compositions of the present invention comprising a combination of (1) one or more CRIPs set for the in Table A, i.e., A1-A68, (2) one or more of Insecticidal Agents set forth in Table B, i.e., B1-B479, and (3) an excipient, may be made available in a spray product as an aerosol, a mosquito coil, and/or a vaporizer or fogger.

[0939] In some embodiments, a sprayable composition may contain an amount of comprising a combination of one or more CRIPs set for the in Table A, i.e., A1-A68, ranging from about 0.005 wt % to about 99 wt %.

[0940] In some embodiments, a sprayable composition may contain an amount of comprising a combination of one or more Insecticidal Agents set forth in Table B, i.e., B1-B479, ranging from about 0.005 wt % to about 99 wt %.

[0941] Fabric Treatments

[0942] In some embodiments, fabrics and garments may be made containing a pesticidal effective composition comprising a combination of (1) one or more CRIPs set for the in Table A, i.e., A1-A68, (2) one or more Insecticidal Agents set forth in Table B, i.e., B1-B479, and (3) an excipient. In some embodiments, the concentration of the CRIP, CRIP-insecticidal protein, or Insecticidal Agent in the polymeric material, fiber, yarn, weave, net, or substrate described herein, can be varied within a relatively wide concentration range from, for example, 0.05 to 15 percent by weight, preferably 0.2 to 10 percent by weight, more preferably 0.4 to 8 percent by weight, especially 0.5 to 5, such as 1 to 3, percent by weight.

[0943] Similarly, the concentration of the composition comprising a combination of (1) one or more CRIPs set for the in Table A, i.e., A1-A68, (2) one or more Insecticidal Agents set forth in Table B, i.e., B1-B479, and (3) an excipient, (whether for treating surfaces or for coating a fiber, yarn, net, weave) can be varied within a relatively wide concentration range from, for example 0.1 to 70 percent by weight, such as 0.5 to 50 percent by weight, preferably 1 to 40 percent by weight, more preferably 5 to 30 percent by weight, especially 10 to 20 percent by weight.

[0944] The concentration of the CRIP, CRIP-insecticidal protein, or Insecticidal Agent may be chosen according to the field of application such that the requirements concerning knockdown efficacy, durability and toxicity are met. Adapting the properties of the material can also be accomplished and so custom-tailored textile fabrics are obtainable in this way.

[0945] Accordingly, an effective amount of a CRIP or Insecticidal Agent can depend on the specific use pattern, the insect pest against which control is most desired and the environment in which the CRIP, CRIP-insecticidal protein, or Insecticidal Agent will be used. Therefore, an effective amount of a CRIP or Insecticidal Agent is sufficient that control of an insect pest is achieved.

[0946] In some embodiments, a sprayable composition may contain an amount of comprising a combination of one or more CRIPs set for the in Table A, i.e., A1-A68, ranging from about 0.005 wt % to about 99 wt %.

[0947] In some embodiments, a sprayable composition may contain an amount of comprising a combination of one or more Insecticidal Agents set forth in Table B, i.e., B1-B479, ranging from about 0.005 wt % to about 99 wt %.

[0948] Surface-Treatment Compositions

[0949] In some embodiments, the present disclosure provides compositions or formulations comprising a combination of (1) one or more CRIPs set for the in Table A, i.e., A1-A68, (2) one or more of Insecticidal Agents set forth in Table B, i.e., B1-B479, and (3) an excipient, for coating walls, floors and ceilings inside of buildings, and for coating a substrate or non-living material. The inventive compositions comprising a combination of (1) one or more CRIPs set for the in Table A, i.e., A1-A68, (2) one or more Insecticidal Agents set forth in Table B, i.e., B1-B479, and (3) an excipient, can be prepared using known techniques for the purpose in mind. Preparations of compositions comprising a combination of (1) one or more CRIPs set for the in Table A, i.e., A1-A68, (2) one or more of Insecticidal Agents set forth in Table B, i.e., B1-B479, and (3) an excipient, could be so formulated to also contain a binder to facilitate the binding of the compound to the surface or other substrate. Agents useful for binding are known in the art and tend to be polymeric in form. The type of binder suitable for a compositions to be applied to a wall surface having particular porosities and/or binding characteristics would be different compared to a fiber, yarn, weave or net—thus, a skilled person, based on known teachings, would select a suitable binder based on the desired surface and/or substrate.

[0950] Typical binders are poly vinyl alcohol, modified starch, poly vinyl acrylate, polyacrylic, polyvinyl acetate co polymer, polyurethane, and modified vegetable oils. Suitable binders can include latex dispersions derived from a wide variety of polymers and co-polymers and combinations thereof. Suitable latexes for use as binders in the inventive compositions comprise polymers and copolymers of styrene, alkyl styrenes, isoprene, butadiene, acrylonitrile lower alkyl acrylates, vinyl chloride, vinylidene chloride, vinyl esters of lower carboxylic acids and alpha, beta-ethylenically unsaturated carboxylic acids, including polymers containing three or more different monomer species copolymerized therein, as well as post-dispersed suspensions of silicones or polyurethanes. Also suitable may be a polytetrafluoroethylene (PTFE) polymer for binding the active ingredient to other surfaces.

[0951] In some embodiments, a sprayable composition may contain an amount of comprising a combination of one or more CRIPs set for the in Table A, i.e., A1-A68, ranging from about 0.005 wt % to about 99 wt %.

[0952] In some embodiments, a sprayable composition may contain an amount of comprising a combination of one or more Insecticidal Agents set forth in Table B, i.e., B1-B479, ranging from about 0.005 wt % to about 99 wt %.

[0953] Dispersants

[0954] In some exemplary embodiments, an insecticidal formulation according to the present disclosure may comprising a combination of (1) one or more CRIPs set for the in Table A, i.e., A1-A68, (2) one or more of Insecticidal Agents set forth in Table B, i.e., B1-B479, and (3) an excipient, e.g., diluent or carrier (e.g., such as water), a polymeric binder, and/or additional components such as a dispersing agent, a polymerizing agent, an emulsifying agent, a thickener, an alcohol, a fragrance, or any other inert excipients used in the preparation of sprayable insecticides known in the art.

[0955] In some embodiments, a composition comprising a combination of (1) one or more CRIPs set for the in Table A, i.e., A1-A68, (2) one or more Insecticidal Agents set forth in Table B, i.e., B1-B479, and (3) an excipient, can be prepared in a number of different forms or formulation types, such as suspensions or capsules suspensions. And a person skilled in the art can prepare the relevant composition based on the properties of the particular CRIP, CRIP-insecticidal protein, or Insecticidal Agent, its uses, and also its application type. For example, the CRIP, CRIP-insecticidal protein, or Insecticidal Agent used in the methods, embodiments, and other aspects of the present disclosure, may be encapsulated in a suspension or capsule suspension formulation. An encapsulated CRIP, CRIP-insecticidal protein, or Insecticidal Agent can provide improved wash-fastness, and also a longer period of activity. The formulation can be organic based or aqueous based, preferably aqueous based.

[0956] In some embodiments, a sprayable composition may contain an amount of comprising a combination of one or more CRIPs set for the in Table A, i.e., A1-A68, ranging from about 0.005 wt % to about 99 wt %.

[0957] In some embodiments, a sprayable composition may contain an amount of comprising a combination of one or more Insecticidal Agents set forth in Table B, i.e., B1-B479, ranging from about 0.005 wt % to about 99 wt %.

[0958] Microencapsulation

[0959] Microencapsulated CRIP, CRIP-insecticidal protein, or Insecticidal Agent suitable for use in the compositions and methods according to the present disclosure may be prepared with any suitable technique known in the art. For example, various processes for microencapsulating material have been previously developed. These processes can be divided into three categories: physical methods, phase separation, and interfacial reaction. In the physical methods category, microcapsule wall material and core particles are physically brought together and the wall material flows around the core particle to form the microcapsule. In the phase separation category, microcapsules are formed by emulsifying or dispersing the core material in an immiscible continuous phase in which the wall material is dissolved and caused to physically separate from the continuous phase, such as by coacervation, and deposit around the core particles. In the interfacial reaction category, microcapsules are formed by emulsifying or dispersing the core material in an immiscible continuous phase and then an interfacial polymerization reaction is caused to take place at the surface of the core particles. The concentration of the CRIP, CRIP-insecticidal protein, or Insecticidal Agent present in the microcapsules can vary from 0.1 to 60% by weight of the microcapsule.

[0960] In some embodiments, a sprayable composition may contain an amount of comprising a combination of one or more CRIPs set for the in Table A, i.e., A1-A68, ranging from about 0.005 wt % to about 99 wt %.

[0961] In some embodiments, a sprayable composition may contain an amount of comprising a combination of one or more Insecticidal Agents set forth in Table B, i.e., B1-B479, ranging from about 0.005 wt % to about 99 wt %.

[0962] Kits, formulations, dispersants, and the ingredients thereof.

[0963] The formulation used in the compositions (comprising a combination of (1) one or more CRIPs set for the in Table A, i.e., A1-A68, (2) one or more Insecticidal Agents set forth in Table B, i.e., B1-B479, and (3) an excipient), methods, embodiments and other aspects according to the present disclosure, may be formed by mixing all ingredients together with water, and optionally using suitable mixing and/or dispersing aggregates. In general, such a formulation is formed at a temperature of from 10 to 70° C., preferably 15 to 50° C., more preferably 20 to 40° C. Generally, a formulation comprising one or more of (A), (B), (C), and/or (D) is possible, wherein it is possible to use: a CRIP and Insecticidal Agent (as pesticide) (A); solid polymer (B); optional additional additives (D); and to disperse them in the aqueous component (C). If a binder is present in a composition of the present invention (comprising a combination of (1) one or more CRIPs set for the in Table A, i.e., A1-A68, (2) one or more Insecticidal Agents set forth in Table B, i.e., B1-B479, and (3) an excipient), it is preferred to use dispersions of the polymeric binder (B) in water as well as aqueous formulations of the CRIP, CRIP-insecticidal protein, or Insecticidal Agent (A) in water which have been separately prepared before. Such separate formulations may contain additional additives for stabilizing (A) and/or (B) in the respective formulations and are commercially available. In a second process step, such raw formulations and optionally additional water (component (C)) are added. Also, combinations of the abovementioned ingredients based on the foregoing scheme are likewise possible, e.g., using a pre-formed dispersion of (A) and/or (B) and mixing it with solid (A) and/or (B). A dispersion of the polymeric binder (B) may be a pre-manufactured dispersion already made by a chemicals manufacturer.

[0964] Moreover, it is also within the scope of the present invention to use “hand-made” dispersions, i.e., dispersions made in small-scale by an end-user. Such dispersions may be made by providing a mixture of about 20 percent of the binder (B) in water, heating the mixture to temperature of 90° C. to 100° C. and intensively stirring the mixture for several hours. It is possible to manufacture the formulation as a final product so that it can be readily used by the end-user for the process according to the present invention. And, it is of course similarly possible to manufacture a concentrate, which may be diluted by the end-user with additional water (C) to the desired concentration for use.

[0965] In an embodiment, a composition (comprising a combination of (1) one or more CRIPs set for the in Table A, i.e., A1-A68, (2) one or more Insecticidal Agents set forth in Table B, i.e., B1-B479, and (3) an excipient) suitable for SSI application or a coating formulation (comprising a combination of (1) one or more CRIPs set for the in Table A, i.e., A1-A68, (2) one or more Insecticidal Agents set forth in Table B, i.e., B1-B479, and (3) an excipient), contains the active ingredient and a carrier, such as water, and may also one or more co-formulants selected from a dispersant, a wetter, an anti-freeze, a thickener, a preservative, an emulsifier and a binder or sticker.

[0966] In some embodiments, an exemplary solid formulation of a CRIP or Insecticidal Agent, is generally milled to a desired particle size, such as the particle size distribution d(0.5) is generally from 3 to 20, preferably 5 to 15, especially 7 to 12, μm.

[0967] Furthermore, it may be possible to ship the formulation to the end-user as a kit comprising at least a first component comprising a combination of (1) one or more CRIPs set for the in Table A, i.e., A1-A68, (2) one or more of Insecticidal Agents set forth in Table B, i.e., B1-B479 (A); and a second component comprising at least one polymeric binder (B). Further additives (D) may be a third separate component of the kit, or may be already mixed with components (A) and/or (B). The end-user may prepare the formulation for use by just adding water (C) to the components of the kit and mixing. The components of the kit may also be formulations in water. Of course it is possible to combine an aqueous formulation of one of the components with a dry formulation of the other component(s). As an example, the kit can consist of one formulation of comprising a combination of (1) one or more CRIPs set for the in Table A, i.e., A1-A68, (2) one or more of Insecticidal Agents set forth in Table B, i.e., B1-B479, (A) and optionally water (C); and a second, separate formulation of at least one polymeric binder (B), water as component (C) and optionally components (D).

[0968] The concentrations of the components (A), (B), (C) and optionally (D) will be selected by the skilled artisan depending of the technique to be used for coating/treating. In general, the amount of a combination of (1) one or more CRIPs set for the in Table A, i.e., A1-A68, (2) one or more of Insecticidal Agents set forth in Table B, i.e., B1-B479, (A) may be up to 50, preferably 1 to 50, such as 10 to 40, especially 15 to 30, percent by weight, based on weight of the composition. The amount of polymeric binder (B) may be in the range of 0.01 to 30, preferably 0.5 to 15, more preferably 1 to 10, especially 1 to 5, percent by weight, based on weight of the composition. If present, in general the amount of additional components (D) is from 0.1 to 20, preferably 0.5 to 15, percent by weight, based on weight of the composition. If present, suitable amounts of pigments and/or dyestuffs and/or fragrances are in general 0.01 to 5, preferably 0.1 to 3, more preferably 0.2 to 2, percent by weight, based on weight of the composition. A typical formulation ready for use comprises 0.1 to 40, preferably 1 to 30, percent of components (A), (B), and optionally (D), the residual amount being water (C). A typical concentration of a concentrate to be diluted by the end-user may comprise 5 to 70, preferably 10 to 60, percent of components (A), (B), and optionally (D), the residual amount being water (C).

[0969] Any of the CRIPs set for the in Table A, i.e., A1-A68, or the Insecticidal Agents set forth in Table B, i.e., B1-B479, as described herein; and/or any of the methods regarding the same, can be used to create any of the foregoing sprayable compositions, formulations, and/or kits as described herein.

[0970] Tvp Compositions

[0971] Vitrification

[0972] Vitrification describes a process wherein the reaction kinetics of a peptide are slowed down via immobilization of the peptide in a rigid, amorphous glassy sugar matrix: this results in drastically slowing down degradation of the peptide. See Slade et al., Beyond water activity: recent advances based on an alternative approach to the assessment of food quality and safety, Crit. Rev. Food Sci. Nutr. 30 (1991) 115-360. The unfolding of peptides, and other mechanisms of degradation, are dependent on molecular mobility of a peptide; thus, vitrification slows down such degradation. See Change et al., Mechanism of protein stabilization by sugars during freeze-drying and storage: native structure preservation, specific interaction, and/or immobilization in a glassy matrix?, J Pharm. Sci. 94 (2005) 1427-1444; and G. O. Poinar and R. Hess, Ultrastructure of 40-million-year-old insect tissue, Science 80 (215) (1982) 1241-1242.

[0973] An exemplary description of vitrification, and considerations thereof in the stabilization of peptides, is provided in Mensink et al., How sugars protect proteins in the solid state and during drying (review): Mechanisms of stabilization in relation to stress conditions. Eur J Pharm Biopharm. 2017 May; 114:288-295; the disclosure of which is incorporated herein by reference in its entirety.

[0974] In some embodiments, a CRIP or a CRIP-insecticidal protein, e.g., a TVP of the present invention, can be vitrified. For example, in some embodiments, a TVP of the present invention can be stabilized using the process of vitrification.

[0975] In some embodiments, vitrification can occur via the use of sugar. In some embodiments, the sugar can be trehalose.

[0976] Trehalose

[0977] Trehalose is a disaccharide formed by a 1,1-glycosidic bond between two α-glucose units. In some embodiments, he molecular formula for trehalose is C₁₂H₂₂O₁₁; having a molecular weight of 342.3 g/mol.

[0978] Trehalose is found in nature as a disaccharide and also as a monomer in some polymers; however, some trehalose isomers exist that are not found in nature. See Elbein et al., New insights on trehalose: a multifunctional molecule. Glycobiology. 2003 April; 13(4):17R-27R.

[0979] Trehalose has been shown to stabilize proteins and cells against stresses such as heat, freezing, and desiccation. See K. Lippert and E. Galinski, Appl. Microbiol. Biotechnol., 1992, 37, 61-65; J. K. Kaushik and R. Bhat, J. Biol. Chem., 2003, 278, 26458-26465; R. P. Baptista, S. Pedersen, G. J. Cabrita, D. E. Otzen, J. M. Cabral and E. P. Melo, Biopolymers, 2008, 89, 538-547; Guo et al., Nat. Biotechnol., 2000, 18, 168-171; Hengherr et al., FEBS J., 2008, 275, 281-288; Crowe et al., Science, 1984, 223, 701-703; Beattie et al., Diabetes, 1997, 46, 519-523; P. Sundaramurthi and R. Suryanarayanan, J. Phys. Chem. Lett., 2009, 1, 510-514; Duong et al., Appl. Environ. Microbiol., 2006, 72, 1218-1225.

[0980] Indeed, some animals accumulate trehalose to significant levels in response to environmental stresses, thus emphasizing the ability of trehalose to stabilize biological molecules. See P. Westh and H. Ramlev, J. Exp. Zool., 1991, 258, 303-311; and K. A. C. Madin and J. H. Crowe, J. Exp. Zool., 1975, 193, 335-342. Furthermore, trehalose is generally regarded as safe, and is used in several pharmaceutical drugs as stabilizers. See N. K. Jain and I. Roy, Protein Sci., 2009, 18, 24-36; and S. Ohtake and Y. J. Wang, J. Pharm. Sci., 2011, 100, 2020-2053.

[0981] The use of trehalose is well known in the art. Trehalose is readily available from commercial sources. For example, D-(+)-Trehalose dihydrate (Product No. T9531); and Trehalose (Product Nos. PHR1344 and 1673715) are available from Sigma Aldrich (Sigma-Aldrich Corp. St. Louis, MO, USA).

[0982] Exemplary trehalose molecules are provided herein, having an Chemical Abstracts Service (CAS) Reg. No. 99-20-7 (anhydrous); and CAS Reg. No. 6138-23-4 (dihydrous). An exemplary trehalose compound of the present disclosure has a PubChem CID No. 7427.

[0983] Exemplary descriptions of the use of trehalose to stabilize peptides is provided in U.S. Pat. Nos. 6,165,981; 6,171,586; 6,991,790; 7,956,028; 10,273,333; and 10,588,957; the disclosures of which are incorporated herein by reference in their entireties.

[0984] Exemplary descriptions of the preparation and use of trehalose in compositions is provided in U.S. Pat. No. 7,678,764, the disclosure of which is incorporated herein by reference in its entirety.

[0985] Ranges and descriptions of TVP compositions and components thereof.

[0986] As used herein, “formulation” and “composition” are synonymous.

[0987] In some embodiments, a formulation comprising an Insecticidal Agent (IA) and a TVP, TVP-insecticidal protein, or a pharmaceutically acceptable salt thereof, can be a liquid concentrate, a wettable powder, or a granule formulation. In some embodiments, any of the TVPs, TVP-insecticidal proteins, or pharmaceutically acceptable salts thereof, as described herein, can be used in the any of the formulations described below, e.g., any of the foregoing TVPs, TVP-insecticidal proteins, or pharmaceutically acceptable salts thereof, can be used in the formulation of: a wettable powder or granule formulation; or a liquid concentrate formulation.

[0988] In some embodiments, a formulation comprises, consists essentially of, or consists of: (1) one or more IAs as described herein (e.g., those enumerated in Table B; (2) a TVP, a TVP-insecticidal protein, or a pharmaceutically acceptable salt thereof; and (3) one or more excipients; wherein the excipients comprise, consist essentially of, or consist of: trehalose; potassium phosphate dibasic (K₂HPO₄); potassium phosphate monobasic (KH₂PO₄); maltodextrin; and BIT.

[0989] In some embodiments, a formulation of the present invention comprises, a concentration of trehalose ranging from about 0.01%, 0.02%, 0.03%, 0.04%, 0.05%, 0.06%, 0.07%, 0.08%, 0.09%, 0.1%, 0.2%, 0.3%, 0.4%, 0.5%, 0.6%, 0.7%, 0.8%, 0.9%, 1%, 2%, 3%, 4%, 5%, 6%, 7%, 8%, 9%, 10%, 11%, 12%, 13%, 14%, 15%, 16%, 17%, 18%, 19%, 20%, 21%, 22%, 23%, 24%, 25%, 26%, 27%, 28%, 29%, 30%, 31%, 32%, 33%, 34%, 35%, 36%, 37%, 38%, 39%, 40%, 41%, 42%, 43%, 44%, 45%, 46%, 47%, 48%, 49%, 50%, 51%, 52%, 53%, 54%, 55%, 56%, 57%, 58%, 59%, 60%, 61%, 62%, 63%, 64%, 65%, 66%, 67%, 68%, 69%, 70%, 71%, 72%, 73%, 74%, 75%, 76%, 77%, 78%, 79%, 80%, 81%, 82%, 83%, 84%, 85%, 86%, 87%, 88%, 89%, 90%, 91%, 92%, 93%, 94%, 95%, 96%, 97%, 98%, 99%, 99.1%, 99.2%, 99.3%, 99.4%, 99.5%, 99.6%, 99.7%, 99.8%, or 99.9% by weight of the total formulation.

[0990] In some embodiments, a formulation of the present invention comprises, a concentration of trehalose ranging from about 0.1% to about 99.9%; from about 1% to about 99.9%; from about 2% to about 99.9%; from about 3% to about 99.9%; from about 4% to about 99.9%; from about 5% to about 99.9%; from about 6% to about 99.9%; from about 7% to about 99.9%; from about 8% to about 99.9%; from about 9% to about 99.9%; from about 10% to about 99.9%; from about 11% to about 99.9%; from about 12% to about 99.9%; from about 13% to about 99.9%; from about 14% to about 99.9%; from about 15% to about 99.9%; from about 16% to about 99.9%; from about 17% to about 99.9%; from about 18% to about 99.9%; from about 19% to about 99.9%; from about 20% to about 99.9%; from about 21% to about 99.9%; from about 22% to about 99.9%; from about 23% to about 99.9%; from about 24% to about 99.9%; from about 25% to about 99.9%; from about 26% to about 99.9%; from about 27% to about 99.9%; from about 28% to about 99.9%; from about 29% to about 99.9%; from about 30% to about 99.9%; from about 31% to about 99.9%; from about 32% to about 99.9%; from about 33% to about 99.9%; from about 34% to about 99.9%; from about 35% to about 99.9%; from about 36% to about 99.9%; from about 37% to about 99.9%; from about 38% to about 99.9%; from about 39% to about 99.9%; from about 40% to about 99.9%; from about 41% to about 99.9%; from about 42% to about 99.9%; from about 43% to about 99.9%; from about 44% to about 99.9%; from about 45% to about 99.9%; from about 46% to about 99.9%; from about 47% to about 99.9%; from about 48% to about 99.9%; from about 49% to about 99.9%; from about 50% to about 99.9%; from about 51% to about 99.9%; from about 52% to about 99.9%; from about 53% to about 99.9%; from about 54% to about 99.9%; from about 55% to about 99.9%; from about 56% to about 99.9%; from about 57% to about 99.9%; from about 58% to about 99.9%; from about 59% to about 99.9%; from about 60% to about 99.9%; from about 61% to about 99.9%; from about 62% to about 99.9%; from about 63% to about 99.9%; from about 64% to about 99.9%; from about 65% to about 99.9%; from about 66% to about 99.9%; from about 67% to about 99.9%; from about 68% to about 99.9%; from about 69% to about 99.9%; from about 70% to about 99.9%; from about 71% to about 99.9%; from about 72% to about 99.9%; from about 73% to about 99.9%; from about 74% to about 99.9%; from about 75% to about 99.9%; from about 76% to about 99.9%; from about 77% to about 99.9%; from about 78% to about 99.9%; from about 79% to about 99.9%; from about 80% to about 99.9%; from about 81% to about 99.9%; from about 82% to about 99.9%; from about 83% to about 99.9%; from about 84% to about 99.9%; from about 85% to about 99.9%; from about 86% to about 99.9%; from about 87% to about 99.9%; from about 88% to about 99.9%; from about 89% to about 99.9%; from about 90% to about 99.9%; from about 91% to about 99.9%; from about 92% to about 99.9%; from about 93% to about 99.9%; from about 94% to about 99.9%; from about 95% to about 99.9%; from about 96% to about 99.9%; from about 97% to about 99.9%; from about 98% to about 99.9%; or from about 99% to about 99.9%, wt/wt of the total formulation.

[0991] In some embodiments, a formulation of the present invention comprises a concentration of trehalose ranging from about 0.1% to about 99%; from about 0.1% to about 98%; from about 0.1% to about 97%; from about 0.1% to about 96%; from about 0.1% to about 95%; from about 0.1% to about 94%; from about 0.1% to about 93%; from about 0.1% to about 92%; from about 0.1% to about 91%; from about 0.1% to about 90%; from about 0.1% to about 89%; from about 0.1% to about 88%; from about 0.1% to about 87%; from about 0.1% to about 86%; from about 0.1% to about 85%; from about 0.1% to about 84%; from about 0.1% to about 83%; from about 0.1% to about 82%; from about 0.1% to about 81%; from about 0.1% to about 80%; from about 0.1% to about 79%; from about 0.1% to about 78%; from about 0.1% to about 77%; from about 0.1% to about 76%; from about 0.1% to about 75%; from about 0.1% to about 74%; from about 0.1% to about 73%; from about 0.1% to about 72%; from about 0.1% to about 71%; from about 0.1% to about 70%; from about 0.1% to about 69%; from about 0.1% to about 68%; from about 0.1% to about 67%; from about 0.1% to about 66%; from about 0.1% to about 65%; from about 0.1% to about 64%; from about 0.1% to about 63%; from about 0.1% to about 62%; from about 0.1% to about 61%; from about 0.1% to about 60%; from about 0.1% to about 59%; from about 0.1% to about 58%; from about 0.1% to about 57%; from about 0.1% to about 56%; from about 0.1% to about 55%; from about 0.1% to about 54%; from about 0.1% to about 53%; from about 0.1% to about 52%; from about 0.1% to about 51%; from about 0.1% to about 50%; from about 0.1% to about 49%; from about 0.1% to about 48%; from about 0.1% to about 47%; from about 0.1% to about 46%; from about 0.1% to about 45%; from about 0.1% to about 44%; from about 0.1% to about 43%; from about 0.1% to about 42%; from about 0.1% to about 41%; from about 0.1% to about 40%; from about 0.1% to about 39%; from about 0.1% to about 38%; from about 0.1% to about 37%; from about 0.1% to about 36%; from about 0.1% to about 35%; from about 0.1% to about 34%; from about 0.1% to about 33%; from about 0.1% to about 32%; from about 0.1% to about 31%; from about 0.1% to about 30%; from about 0.1% to about 29%; from about 0.1% to about 28%; from about 0.1% to about 27%; from about 0.1% to about 26%; from about 0.1% to about 25%; from about 0.1% to about 24%; from about 0.1% to about 23%; from about 0.1% to about 22%; from about 0.1% to about 21%; from about 0.1% to about 20%; from about 0.1% to about 19%; from about 0.1% to about 18%; from about 0.1% to about 17%; from about 0.1% to about 16%; from about 0.1% to about 15%; from about 0.1% to about 14%; from about 0.1% to about 13%; from about 0.1% to about 12%; from about 0.1% to about 11%; from about 0.1% to about 10%; from about 0.1% to about 9%; from about 0.1% to about 8%; from about 0.1% to about 7%; from about 0.1% to about 6%; from about 0.1% to about 5%; from about 0.1% to about 4%; from about 0.1% to about 3%; from about 0.1% to about 2%; from about 0.1% to about 1%; or from about 0.1% to about 0.5%, wt/wt of the total formulation.

[0992] In some embodiments, a formulation of the present invention comprises a concentration of potassium phosphate dibasic (K₂HPO₄) ranging from about 0.1% to about 40%; from about 0.5% to about 40%; from about 1% to about 40%; from about 2% to about 40%; from about 3% to about 40%; from about 4% to about 40%; from about 5% to about 40%; from about 6% to about 40%; from about 7% to about 40%; from about 8% to about 40%; from about 9% to about 40%; from about 10% to about 40%; from about 11% to about 40%; from about 12% to about 40%; from about 13% to about 40%; from about 14% to about 40%; from about 15% to about 40%; from about 16% to about 40%; from about 17% to about 40%; from about 18% to about 40%; from about 19% to about 40%; from about 20% to about 40%; from about 21% to about 40%; from about 22% to about 40%; from about 23% to about 40%; from about 24% to about 40%; from about 25% to about 40%; from about 26% to about 40%; from about 27% to about 40%; from about 28% to about 40%; from about 29% to about 40%; from about 30% to about 40%; from about 31% to about 40%; from about 32% to about 40%; from about 33% to about 40%; from about 34% to about 40%; from about 35% to about 40%; from about 36% to about 40%; from about 37% to about 40%; from about 38% to about 40%; or from about 39% to about 40%; wt/wt of the total formulation.

[0993] In some embodiments, a formulation of the present invention comprises a concentration of potassium phosphate dibasic (K₂HPO₄) ranging from about 0.1% to about 40%; from about 0.1% to about 39%; from about 0.1% to about 38%; from about 0.1% to about 37%; from about 0.1% to about 36%; from about 0.1% to about 35%; from about 0.1% to about 34%; from about 0.1% to about 33%; from about 0.1% to about 32%; from about 0.1% to about 31%; from about 0.1% to about 30%; from about 0.1% to about 29%; from about 0.1% to about 28%; from about 0.1% to about 27%; from about 0.1% to about 26%; from about 0.1% to about 25%; from about 0.1% to about 24%; from about 0.1% to about 23%; from about 0.1% to about 22%; from about 0.1% to about 21%; from about 0.1% to about 20%; from about 0.1% to about 19%; from about 0.1% to about 18%; from about 0.1% to about 17%; from about 0.1% to about 16%; from about 0.1% to about 15%; from about 0.1% to about 14%; from about 0.1% to about 13%; from about 0.1% to about 12%; from about 0.1% to about 11%; from about 0.1% to about 10%; from about 0.1% to about 9%; from about 0.1% to about 8%; from about 0.1% to about 7%; from about 0.1% to about 6%; from about 0.1% to about 5%; from about 0.1% to about 4%; from about 0.1% to about 3%; from about 0.1% to about 2%; from about 0.1% to about 1%; or from about 0.1% to about 0.5%, wt/wt of the total formulation.

[0994] In some embodiments, a formulation of the present invention comprises a concentration of potassium phosphate monobasic (KH₂PO₄) ranging from about 0.1% to about 20%; from about 0.5% to about 20%; from about 1% to about 20%; from about 2% to about 20%; from about 3% to about 20%; from about 4% to about 20%; from about 5% to about 20%; from about 6% to about 20%; from about 7% to about 20%; from about 8% to about 20%; from about 9% to about 20%; from about 10% to about 20%; from about 11% to about 20%; from about 12% to about 20%; from about 13% to about 20%; from about 14% to about 20%; from about 15% to about 20%; from about 16% to about 20%; from about 17% to about 20%; from about 18% to about 20%; or from about 19% to about 20%; wt/wt of the total formulation.

[0995] In some embodiments, a formulation of the present invention comprises a concentration of potassium phosphate monobasic (KH₂PO₄) ranging from about 0.1% to about 20%; from about 0.1% to about 19%; from about 0.1% to about 18%; from about 0.1% to about 17%; from about 0.1% to about 16%; from about 0.1% to about 15%; from about 0.1% to about 14%; from about 0.1% to about 13%; from about 0.1% to about 12%; from about 0.1% to about 11%; from about 0.1% to about 10%; from about 0.1% to about 9%; from about 0.1% to about 8%; from about 0.1% to about 7%; from about 0.1% to about 6%; from about 0.1% to about 5%; from about 0.1% to about 4%; from about 0.1% to about 3%; from about 0.1% to about 2%; from about 0.1% to about 1%; or from about 0.1% to about 0.5%, wt/wt of the total formulation.

[0996] In some embodiments, a formulation of the present invention comprises a concentration of maltodextrin ranging from about 0.1% to about 99.9%; from about 1% to about 99.9%; from about 2% to about 99.9%; from about 3% to about 99.9%; from about 4% to about 99.9%; from about 5% to about 99.9%; from about 6% to about 99.9%; from about 7% to about 99.9%; from about 8% to about 99.9%; from about 9% to about 99.9%; from about 10% to about 99.9%; from about 11% to about 99.9%; from about 12% to about 99.9%; from about 13% to about 99.9%; from about 14% to about 99.9%; from about 15% to about 99.9%; from about 16% to about 99.9%; from about 17% to about 99.9%; from about 18% to about 99.9%; from about 19% to about 99.9%; from about 20% to about 99.9%; from about 21% to about 99.9%; from about 22% to about 99.9%; from about 23% to about 99.9%; from about 24% to about 99.9%; from about 25% to about 99.9%; from about 26% to about 99.9%; from about 27% to about 99.9%; from about 28% to about 99.9%; from about 29% to about 99.9%; from about 30% to about 99.9%; from about 31% to about 99.9%; from about 32% to about 99.9%; from about 33% to about 99.9%; from about 34% to about 99.9%; from about 35% to about 99.9%; from about 36% to about 99.9%; from about 37% to about 99.9%; from about 38% to about 99.9%; from about 39% to about 99.9%; from about 40% to about 99.9%; from about 41% to about 99.9%; from about 42% to about 99.9%; from about 43% to about 99.9%; from about 44% to about 99.9%; from about 45% to about 99.9%; from about 46% to about 99.9%; from about 47% to about 99.9%; from about 48% to about 99.9%; from about 49% to about 99.9%; from about 50% to about 99.9%; from about 51% to about 99.9%; from about 52% to about 99.9%; from about 53% to about 99.9%; from about 54% to about 99.9%; from about 55% to about 99.9%; from about 56% to about 99.9%; from about 57% to about 99.9%; from about 58% to about 99.9%; from about 59% to about 99.9%; from about 60% to about 99.9%; from about 61% to about 99.9%; from about 62% to about 99.9%; from about 63% to about 99.9%; from about 64% to about 99.9%; from about 65% to about 99.9%; from about 66% to about 99.9%; from about 67% to about 99.9%; from about 68% to about 99.9%; from about 69% to about 99.9%; from about 70% to about 99.9%; from about 71% to about 99.9%; from about 72% to about 99.9%; from about 73% to about 99.9%; from about 74% to about 99.9%; from about 75% to about 99.9%; from about 76% to about 99.9%; from about 77% to about 99.9%; from about 78% to about 99.9%; from about 79% to about 99.9%; from about 80% to about 99.9%; from about 81% to about 99.9%; from about 82% to about 99.9%; from about 83% to about 99.9%; from about 84% to about 99.9%; from about 85% to about 99.9%; from about 86% to about 99.9%; from about 87% to about 99.9%; from about 88% to about 99.9%; from about 89% to about 99.9%; from about 90% to about 99.9%; from about 91% to about 99.9%; from about 92% to about 99.9%; from about 93% to about 99.9%; from about 94% to about 99.9%; from about 95% to about 99.9%; from about 96% to about 99.9%; from about 97% to about 99.9%; from about 98% to about 99.9%; or from about 99% to about 99.9%, wt/wt of the total formulation.

[0997] In some embodiments, a formulation of the present invention comprises a concentration of maltodextrin ranging from about 0.1% to about 99%; from about 0.1% to about 98%; from about 0.1% to about 97%; from about 0.1% to about 96%; from about 0.1% to about 95%; from about 0.1% to about 94%; from about 0.1% to about 93%; from about 0.1% to about 92%; from about 0.1% to about 91%; from about 0.1% to about 90%; from about 0.1% to about 89%; from about 0.1% to about 88%; from about 0.1% to about 87%; from about 0.1% to about 86%; from about 0.1% to about 85%; from about 0.1% to about 84%; from about 0.1% to about 83%; from about 0.1% to about 82%; from about 0.1% to about 81%; from about 0.1% to about 80%; from about 0.1% to about 79%; from about 0.1% to about 78%; from about 0.1% to about 77%; from about 0.1% to about 76%; from about 0.1% to about 75%; from about 0.1% to about 74%; from about 0.1% to about 73%; from about 0.1% to about 72%; from about 0.1% to about 71%; from about 0.1% to about 70%; from about 0.1% to about 69%; from about 0.1% to about 68%; from about 0.1% to about 67%; from about 0.1% to about 66%; from about 0.1% to about 65%; from about 0.1% to about 64%; from about 0.1% to about 63%; from about 0.1% to about 62%; from about 0.1% to about 61%; from about 0.1% to about 60%; from about 0.1% to about 59%; from about 0.1% to about 58%; from about 0.1% to about 57%; from about 0.1% to about 56%; from about 0.1% to about 55%; from about 0.1% to about 54%; from about 0.1% to about 53%; from about 0.1% to about 52%; from about 0.1% to about 51%; from about 0.1% to about 50%; from about 0.1% to about 49%; from about 0.1% to about 48%; from about 0.1% to about 47%; from about 0.1% to about 46%; from about 0.1% to about 45%; from about 0.1% to about 44%; from about 0.1% to about 43%; from about 0.1% to about 42%; from about 0.1% to about 41%; from about 0.1% to about 40%; from about 0.1% to about 39%; from about 0.1% to about 38%; from about 0.1% to about 37%; from about 0.1% to about 36%; from about 0.1% to about 35%; from about 0.1% to about 34%; from about 0.1% to about 33%; from about 0.1% to about 32%; from about 0.1% to about 31%; from about 0.1% to about 30%; from about 0.1% to about 29%; from about 0.1% to about 28%; from about 0.1% to about 27%; from about 0.1% to about 26%; from about 0.1% to about 25%; from about 0.1% to about 24%; from about 0.1% to about 23%; from about 0.1% to about 22%; from about 0.1% to about 21%; from about 0.1% to about 20%; from about 0.1% to about 19%; from about 0.1% to about 18%; from about 0.1% to about 17%; from about 0.1% to about 16%; from about 0.1% to about 15%; from about 0.1% to about 14%; from about 0.1% to about 13%; from about 0.1% to about 12%; from about 0.1% to about 11%; from about 0.1% to about 10%; from about 0.1% to about 9%; from about 0.1% to about 8%; from about 0.1% to about 7%; from about 0.1% to about 6%; from about 0.1% to about 5%; from about 0.1% to about 4%; from about 0.1% to about 3%; from about 0.1% to about 2%; from about 0.1% to about 1%; or from about 0.1% to about 0.5%, wt/wt of the total formulation.

[0998] In some embodiments, the maltodextrin can have a dextrose equivalent ranging from about 2% to about 20%; from about 3% to about 20%; from about 4% to about 20%; from about 5% to about 20%; from about 6% to about 20%; from about 7% to about 20%; from about 8% to about 20%; from about 9% to about 20%; from about 10% to about 20%; from about 11% to about 20%; from about 12% to about 20%; from about 13% to about 20%; from about 14% to about 20%; from about 15% to about 20%; from about 16% to about 20%; from about 17% to about 20%; from about 18% to about 20%; or from about 19% to about 20%; wt/wt of the total formulation.

[0999] In some embodiments, the maltodextrin can have a dextrose equivalent ranging from about 2% to about 20%; from about 2% to about 19%; from about 2% to about 18%; from about 2% to about 17%; from about 2% to about 16%; from about 2% to about 15%; from about 2% to about 14%; from about 2% to about 13%; from about 2% to about 12%; from about 2% to about 11%; from about 2% to about 10%; from about 2% to about 9%; from about 2% to about 8%; from about 2% to about 7%; from about 2% to about 6%; from about 2% to about 5%; from about 2% to about 4%; or from about 2% to about 3%; wt/wt of the total formulation.

[1000] In some embodiments, a formulation of the present invention comprises a concentration of benzisothiazolinone (BIT) ranging from about 0.01% to about 1%; from about 0.025% to about 1%; from about 0.05% to about 1%; from about 0.075% to about 1%; from about 0.1% to about 1%; from about 0.125% to about 1%; from about 0.15% to about 1%; from about 0.175% to about 1%; from about 0.2% to about 1%; from about 0.225% to about 1%; from about 0.25% to about 1%; from about 0.275% to about 1%; from about 0.3% to about 1%; from about 0.325% to about 1%; from about 0.35% to about 1%; from about 0.375% to about 1%; from about 0.4% to about 1%; from about 0.425% to about 1%; from about 0.45% to about 1%; from about 0.475% to about 1%; from about 0.5% to about 1%; from about 0.525% to about 1%; from about 0.55% to about 1%; from about 0.575% to about 1%; from about 0.6% to about 1%; from about 0.625% to about 1%; from about 0.65% to about 1%; from about 0.675% to about 1%; from about 0.7% to about 1%; from about 0.725% to about 1%; from about 0.75% to about 1%; from about 0.775% to about 1%; from about 0.8% to about 1%; from about 0.825% to about 1%; from about 0.85% to about 1%; from about 0.875% to about 1%; from about 0.9% to about 1%; from about 0.925% to about 1%; from about 0.95% to about 1%; or from about 0.975% to about 1%; wt/wt of the total formulation.

[1001] In some embodiments, a formulation of the present invention comprises a concentration of benzisothiazolinone (BIT) ranging from about 0.01% to about 1%; from about 0.01% to about 0.975%; from about 0.01% to about 0.95%; from about 0.01% to about 0.925%; from about 0.01% to about 0.9%; from about 0.01% to about 0.875%; from about 0.01% to about 0.85%; from about 0.01% to about 0.825%; from about 0.01% to about 0.8%; from about 0.01% to about 0.775%; from about 0.01% to about 0.75%; from about 0.01% to about 0.725%; from about 0.01% to about 0.7%; from about 0.01% to about 0.675%; from about 0.01% to about 0.65%; from about 0.01% to about 0.625%; from about 0.01% to about 0.6%; from about 0.01% to about 0.575%; from about 0.01% to about 0.55%; from about 0.01% to about 0.525%; from about 0.01% to about 0.5%; from about 0.01% to about 0.475%; from about 0.01% to about 0.45%; from about 0.01% to about 0.425%; from about 0.01% to about 0.4%; from about 0.01% to about 0.375%; from about 0.01% to about 0.35%; from about 0.01% to about 0.325%; from about 0.01% to about 0.3%; from about 0.01% to about 0.275%; from about 0.01% to about 0.25%; from about 0.01% to about 0.225%; from about 0.01% to about 0.2%; from about 0.01% to about 0.175%; from about 0.01% to about 0.15%; from about 0.01% to about 0.125%; from about 0.01% to about 0.1%; from about 0.01% to about 0.075%; from about 0.01% to about 0.05%; or from about 0.01% to about 0.025%; wt/wt of the total formulation.

[1002] In some embodiments, the BIT can be 1,2-Benzisothiazolin-3-one. An exemplary 1,2-Benzisothiazolin-3-one is provided herein, having a CAS No. 2634-33-5. An exemplary description describing how to make 1,2-Benzisothiazolin-3-one is provided in WIPO Publication No. WO2014173716A1, the disclosure of which is incorporated herein by reference in its entirety. In addition, 1,2-Benzisothiazolin-3-one is readily available from commercial vendors, e.g., PROXEL® AQ Preservative; 9.25% aqueous solution of 1,2-benzisothiazolin-3-one; available from Lonza Group Ltd. Muenchensteinerstrasse 38, CH-4002 Basel, Switzerland.

[1003] In some embodiments, a formulation of the present invention comprises a concentration of lignosulfonate ranging from about 0.1% to about 1%; from about 0.125% to about 1%; from about 0.15% to about 1%; from about 0.175% to about 1%; from about 0.2% to about 1%; from about 0.225% to about 1%; from about 0.25% to about 1%; from about 0.275% to about 1%; from about 0.3% to about 1%; from about 0.325% to about 1%; from about 0.35% to about 1%; from about 0.375% to about 1%; from about 0.4% to about 1%; from about 0.425% to about 1%; from about 0.45% to about 1%; from about 0.475% to about 1%; from about 0.5% to about 1%; from about 0.525% to about 1%; from about 0.55% to about 1%; from about 0.575% to about 1%; from about 0.6% to about 1%; from about 0.625% to about 1%; from about 0.65% to about 1%; from about 0.675% to about 1%; from about 0.7% to about 1%; from about 0.725% to about 1%; from about 0.75% to about 1%; from about 0.775% to about 1%; from about 0.8% to about 1%; from about 0.825% to about 1%; from about 0.85% to about 1%; from about 0.875% to about 1%; from about 0.9% to about 1%; from about 0.925% to about 1%; from about 0.95% to about 1%; or from about 0.975% to about 1%; wt/wt of the total formulation.

[1004] In some embodiments, a formulation of the present invention comprises a concentration of lignosulfonate from about 0.1% to about 1%; from about 0.1% to about 0.975%; from about 0.1% to about 0.95%; from about 0.1% to about 0.925%; from about 0.1% to about 0.9%; from about 0.1% to about 0.875%; from about 0.1% to about 0.85%; from about 0.1% to about 0.825%; from about 0.1% to about 0.8%; from about 0.1% to about 0.775%; from about 0.1% to about 0.75%; from about 0.1% to about 0.725%; from about 0.1% to about 0.7%; from about 0.1% to about 0.675%; from about 0.1% to about 0.65%; from about 0.1% to about 0.625%; from about 0.1% to about 0.6%; from about 0.1% to about 0.575%; from about 0.1% to about 0.55%; from about 0.1% to about 0.525%; from about 0.1% to about 0.5%; from about 0.1% to about 0.475%; from about 0.1% to about 0.45%; from about 0.1% to about 0.425%; from about 0.1% to about 0.4%; from about 0.1% to about 0.375%; from about 0.1% to about 0.35%; from about 0.1% to about 0.325%; from about 0.1% to about 0.3%; from about 0.1% to about 0.275%; from about 0.1% to about 0.25%; from about 0.1% to about 0.225%; from about 0.1% to about 0.2%; from about 0.1% to about 0.175%; from about 0.1% to about 0.15%; or from about 0.1% to about 0.125%; wt/wt of the total formulation.

[1005] In some embodiments, a formulation of the present invention comprises a concentration of gypsum ranging from about 0.1% to about 1%; from about 0.125% to about 1%; from about 0.15% to about 1%; from about 0.175% to about 1%; from about 0.2% to about 1%; from about 0.225% to about 1%; from about 0.25% to about 1%; from about 0.275% to about 1%; from about 0.3% to about 1%; from about 0.325% to about 1%; from about 0.35% to about 1%; from about 0.375% to about 1%; from about 0.4% to about 1%; from about 0.425% to about 1%; from about 0.45% to about 1%; from about 0.475% to about 1%; from about 0.5% to about 1%; from about 0.525% to about 1%; from about 0.55% to about 1%; from about 0.575% to about 1%; from about 0.6% to about 1%; from about 0.625% to about 1%; from about 0.65% to about 1%; from about 0.675% to about 1%; from about 0.7% to about 1%; from about 0.725% to about 1%; from about 0.75% to about 1%;

[1006] from about 0.775% to about 1%; from about 0.8% to about 1%; from about 0.825% to about 1%; from about 0.85% to about 1%; from about 0.875% to about 1%; from about 0.9% to about 1%; from about 0.925% to about 1%; from about 0.95% to about 1%; or from about 0.975% to about 1%; wt/wt of the total formulation.

[1007] In some embodiments, a formulation of the present invention comprises a concentration of gypsum ranging from about 0.1% to about 1%; from about 0.1% to about 0.975%; from about 0.1% to about 0.95%; from about 0.1% to about 0.925%; from about 0.1% to about 0.9%; from about 0.1% to about 0.875%; from about 0.1% to about 0.85%; from about 0.1% to about 0.825%; from about 0.1% to about 0.8%; from about 0.1% to about 0.775%; from about 0.1% to about 0.75%; from about 0.1% to about 0.725%; from about 0.1% to about 0.7%; from about 0.1% to about 0.675%; from about 0.1% to about 0.65%; from about 0.1% to about 0.625%; from about 0.1% to about 0.6%; from about 0.1% to about 0.575%; from about 0.1% to about 0.55%; from about 0.1% to about 0.525%; from about 0.1% to about 0.5%; from about 0.1% to about 0.475%; from about 0.1% to about 0.45%; from about 0.1% to about 0.425%; from about 0.1% to about 0.4%; from about 0.1% to about 0.375%; from about 0.1% to about 0.35%; from about 0.1% to about 0.325%; from about 0.1% to about 0.3%; from about 0.1% to about 0.275%; from about 0.1% to about 0.25%; from about 0.1% to about 0.225%; from about 0.1% to about 0.2%; from about 0.1% to about 0.175%; from about 0.1% to about 0.15%; or from about 0.1% to about 0.125%; wt/wt of the total formulation.

[1008] In some embodiments, a formulation of the present invention comprises a concentration of sorbitol ranging from about 0.5% to about 8%; from about 0.75% to about 8%; from about 1% to about 8%; from about 1.25% to about 8%; from about 1.5% to about 8%; from about 1.75% to about 8%; from about 2% to about 8%; from about 2.25% to about 8%; from about 2.5% to about 8%; from about 2.75% to about 8%; from about 3% to about 8%; from about 3.25% to about 8%; from about 3.5% to about 8%; from about 3.75% to about 8%; from about 4% to about 8%; from about 4.25% to about 8%; from about 4.5% to about 8%; from about 4.75% to about 8%; from about 5% to about 8%; from about 5.25% to about 8%; from about 5.5% to about 8%; from about 5.75% to about 8%; from about 6% to about 8%; from about 6.25% to about 8%; from about 6.5% to about 8%; from about 6.75% to about 8%; from about 7% to about 8%; from about 7.25% to about 8%; from about 7.5% to about 8%; or from about 7.75% to about 8%; wt/wt of the total formulation.

[1009] In some embodiments, a formulation of the present invention comprises a concentration of sorbitol ranging from about 0.5% to about 8%; from about 0.5% to about 7.75%; from about 0.5% to about 7.5%; from about 0.5% to about 7.25%; from about 0.5% to about 7%; from about 0.5% to about 6.75%; from about 0.5% to about 6.5%; from about 0.5% to about 6.25%; from about 0.5% to about 6%; from about 0.5% to about 5.75%; from about 0.5% to about 5.5%; from about 0.5% to about 5.25%; from about 0.5% to about 5%; from about 0.5% to about 4.75%; from about 0.5% to about 4.5%; from about 0.5% to about 4.25%; from about 0.5% to about 4%; from about 0.5% to about 3.75%; from about 0.5% to about 3.5%; from about 0.5% to about 3.25%; from about 0.5% to about 3%; from about 0.5% to about 2.75%; from about 0.5% to about 2.5%; from about 0.5% to about 2.25%; from about 0.5% to about 2%; from about 0.5% to about 1.75%; from about 0.5% to about 1.5%; from about 0.5% to about 1.25%; from about 0.5% to about 1%; or from about 0.5% to about 0.75%; wt/wt of the total formulation.

[1010] In some embodiments, a formulation of the present invention comprises a concentration of sodium benzoate ranging from about 0.1% to about 1%; from about 0.125% to about 1%; from about 0.15% to about 1%; from about 0.175% to about 1%; from about 0.2% to about 1%; from about 0.225% to about 1%; from about 0.25% to about 1%; from about 0.275% to about 1%; from about 0.3% to about 1%; from about 0.325% to about 1%; from about 0.35% to about 1%; from about 0.375% to about 1%; from about 0.4% to about 1%; from about 0.425% to about 1%; from about 0.45% to about 1%; from about 0.475% to about 1%; from about 0.5% to about 1%; from about 0.525% to about 1%; from about 0.55% to about 1%; from about 0.575% to about 1%; from about 0.6% to about 1%; from about 0.625% to about 1%; from about 0.65% to about 1%; from about 0.675% to about 1%; from about 0.7% to about 1%; from about 0.725% to about 1%; from about 0.75% to about 1%; from about 0.775% to about 1%; from about 0.8% to about 1%; from about 0.825% to about 1%; from about 0.85% to about 1%; from about 0.875% to about 1%; from about 0.9% to about 1%; from about 0.925% to about 1%; from about 0.95% to about 1%; or from about 0.975% to about 1%; wt/wt of the total formulation.

[1011] In some embodiments, a formulation of the present invention comprises a concentration of sodium benzoate ranging from about 0.1% to about 1%; from about 0.1% to about 0.975%; from about 0.1% to about 0.95%; from about 0.1% to about 0.925%; from about 0.1% to about 0.9%; from about 0.1% to about 0.875%; from about 0.1% to about 0.85%; from about 0.1% to about 0.825%; from about 0.1% to about 0.8%; from about 0.1% to about 0.775%; from about 0.1% to about 0.75%; from about 0.1% to about 0.725%; from about 0.1% to about 0.7%; from about 0.1% to about 0.675%; from about 0.1% to about 0.65%; from about 0.1% to about 0.625%; from about 0.1% to about 0.6%; from about 0.1% to about 0.575%; from about 0.1% to about 0.55%; from about 0.1% to about 0.525%; from about 0.1% to about 0.5%; from about 0.1% to about 0.475%; from about 0.1% to about 0.45%; from about 0.1% to about 0.425%; from about 0.1% to about 0.4%; from about 0.1% to about 0.375%; from about 0.1% to about 0.35%; from about 0.1% to about 0.325%; from about 0.1% to about 0.3%; from about 0.1% to about 0.275%; from about 0.1% to about 0.25%; from about 0.1% to about 0.225%; from about 0.1% to about 0.2%; from about 0.1% to about 0.175%; from about 0.1% to about 0.15%; or from about 0.1% to about 0.125%; wt/wt of the total formulation.

[1012] In some embodiments, a formulation of the present invention comprises a concentration of potassium sorbate ranging from about 0.1% to about 1%; from about 0.125% to about 1%; from about 0.15% to about 1%; from about 0.175% to about 1%; from about 0.2% to about 1%; from about 0.225% to about 1%; from about 0.25% to about 1%; from about 0.275% to about 1%; from about 0.3% to about 1%; from about 0.325% to about 1%; from about 0.35% to about 1%; from about 0.375% to about 1%; from about 0.4% to about 1%; from about 0.425% to about 1%; from about 0.45% to about 1%; from about 0.475% to about 1%; from about 0.5% to about 1%; from about 0.525% to about 1%; from about 0.55% to about 1%; from about 0.575% to about 1%; from about 0.6% to about 1%; from about 0.625% to about 1%; from about 0.65% to about 1%; from about 0.675% to about 1%; from about 0.7% to about 1%; from about 0.725% to about 1%; from about 0.75% to about 1%; from about 0.775% to about 1%; from about 0.8% to about 1%; from about 0.825% to about 1%; from about 0.85% to about 1%; from about 0.875% to about 1%; from about 0.9% to about 1%; from about 0.925% to about 1%; from about 0.95% to about 1%; or from about 0.975% to about 1%; wt/wt of the total formulation.

[1013] In some embodiments, a formulation of the present invention comprises a concentration of potassium sorbate ranging from about 0.1% to about 1%; from about 0.1% to about 0.975%; from about 0.1% to about 0.95%; from about 0.1% to about 0.925%; from about 0.1% to about 0.9%; from about 0.1% to about 0.875%; from about 0.1% to about 0.85%; from about 0.1% to about 0.825%; from about 0.1% to about 0.8%; from about 0.1% to about 0.775%; from about 0.1% to about 0.75%; from about 0.1% to about 0.725%; from about 0.1% to about 0.7%; from about 0.1% to about 0.675%; from about 0.1% to about 0.65%; from about 0.1% to about 0.625%; from about 0.1% to about 0.6%; from about 0.1% to about 0.575%; from about 0.1% to about 0.55%; from about 0.1% to about 0.525%; from about 0.1% to about 0.5%; from about 0.1% to about 0.475%; from about 0.1% to about 0.45%; from about 0.1% to about 0.425%; from about 0.1% to about 0.4%; from about 0.1% to about 0.375%; from about 0.1% to about 0.35%; from about 0.1% to about 0.325%; from about 0.1% to about 0.3%; from about 0.1% to about 0.275%; from about 0.1% to about 0.25%; from about 0.1% to about 0.225%; from about 0.1% to about 0.2%; from about 0.1% to about 0.175%; from about 0.1% to about 0.15%; or from about 0.1% to about 0.125%; wt/wt of the total formulation.

[1014] In some embodiments, a formulation of the present invention comprises a concentration of EDTA ranging from about 0.1% to about 1%; from about 0.125% to about 1%; from about 0.15% to about 1%; from about 0.175% to about 1%; from about 0.2% to about 1%; from about 0.225% to about 1%; from about 0.25% to about 1%; from about 0.275% to about 1%; from about 0.3% to about 1%; from about 0.325% to about 1%; from about 0.35% to about 1%; from about 0.375% to about 1%; from about 0.4% to about 1%; from about 0.425% to about 1%; from about 0.45% to about 1%; from about 0.475% to about 1%; from about 0.5% to about 1%; from about 0.525% to about 1%; from about 0.55% to about 1%; from about 0.575% to about 1%; from about 0.6% to about 1%; from about 0.625% to about 1%; from about 0.65% to about 1%; from about 0.675% to about 1%; from about 0.7% to about 1%; from about 0.725% to about 1%; from about 0.75% to about 1%; from about 0.775% to about 1%; from about 0.8% to about 1%; from about 0.825% to about 1%; from about 0.85% to about 1%; from about 0.875% to about 1%; from about 0.9% to about 1%; from about 0.925% to about 1%; from about 0.95% to about 1%; or from about 0.975% to about 1%; wt/wt of the total formulation.

[1015] In some embodiments, a formulation of the present invention comprises a concentration of EDTA ranging from about 0.1% to about 1%; from about 0.1% to about 0.975%; from about 0.1% to about 0.95%; from about 0.1% to about 0.925%; from about 0.1% to about 0.9%; from about 0.1% to about 0.875%; from about 0.1% to about 0.85%; from about 0.1% to about 0.825%; from about 0.1% to about 0.8%; from about 0.1% to about 0.775%; from about 0.1% to about 0.75%; from about 0.1% to about 0.725%; from about 0.1% to about 0.7%; from about 0.1% to about 0.675%; from about 0.1% to about 0.65%; from about 0.1% to about 0.625%; from about 0.1% to about 0.6%; from about 0.1% to about 0.575%; from about 0.1% to about 0.55%; from about 0.1% to about 0.525%; from about 0.1% to about 0.5%; from about 0.1% to about 0.475%; from about 0.1% to about 0.45%; from about 0.1% to about 0.425%; from about 0.1% to about 0.4%; from about 0.1% to about 0.375%; from about 0.1% to about 0.35%; from about 0.1% to about 0.325%; from about 0.1% to about 0.3%; from about 0.1% to about 0.275%; from about 0.1% to about 0.25%; from about 0.1% to about 0.225%; from about 0.1% to about 0.2%; from about 0.1% to about 0.175%; from about 0.1% to about 0.15%; or from about 0.1% to about 0.125%; wt/wt of the total formulation.

[1016] In some embodiments a formulation of the present invention can be formulated at a pH ranging from about 5 to about 11; from about 5.5 to about 11; from about 6 to about 11; from about 6.5 to about 11; from about 7 to about 11; from about 7.5 to about 11; from about 8 to about 11; from about 8.5 to about 11; from about 9 to about 11; from about 9.5 to about 11; from about 10 to about 11; or from about 10.5 to about 11.

[1017] In some embodiments a formulation of the present invention can be formulated at a pH ranging from about 5 to about 11; from about 5 to about 10.5; from about 5 to about 10; from about 5 to about 9.5; from about 5 to about 9; from about 5 to about 8.5; from about 5 to about 8; from about 5 to about 7.5; from about 5 to about 7; from about 5 to about 6.5; from about 5 to about 6; or from about 5 to about 5.5.

[1018] In some embodiments the formulation can be formulated into a granule form (granular formulation). Methods of generating a granular formulation are well known in the art, and include: crystallization, precipitation, pan-coating, fluid bed coating, agglomeration (e.g., fluid bed agglomeration), rotary atomization, extrusion, prilling, spheronization, size reduction methods, drum granulation, and/or high shear granulation, and the like.

[1019] In some embodiments, the granular formulation can be generated via agglomeration, e.g., spray-drying agglomeration; rewet agglomeration; fluid bed agglomeration; and the like.

[1020] In some embodiments, the type of agglomeration can be fluid bed agglomeration. Exemplary methods of fluid bed agglomeration are provided in U.S. Pat. No. 7,582,147; the disclosure of which is incorporated herein by reference in its entirety.

[1021] In some embodiments, the granular formulation can be generated via fluid bed agglomeration.

[1022] In some embodiments, the granular formulation can be generated by spraying the active and inert ingredients onto a blank carrier in a fluid bed.

[1023] In some embodiments, the granular formulation can be generated by spraying the active and inert ingredients (excipients) onto a blank carrier and granulated in pan granulator.

[1024] In some embodiments, the granular formulation can be generated by mixing the active and inert powders (i.e., one or more excipients described herein) and water, and subsequently granulated by passing the ingredients through an extruder.

[1025] In some embodiments, the granular formulation can be generated by mixing the active and inert powders (i.e., one or more excipients described herein) with water, and granulated by roll compaction.

[1026] Illustrative Combinations, Compositions, and Products

[1027] The present disclosure contemplates combinations, compositions, and products, comprising one or more CRIPs and one or more Insecticidal Agents (IAs).

[1028] Any of the combinations, combinations, products, polypeptides and/or plants, utilizing a CRIP as described herein and an IA as described herein (e.g., a mixture of one or more of CRIPs: A1-A68, and one or more of IAs: B1-B479), can be used to control pests, their growth, and/or the damage caused by their actions, especially their damage to plants.

[1029] Compositions comprising a combination of one or more of CRIPs: A1-A68 and one or more of IAs: B1-B479 can include agrochemical compositions. For example, in some embodiments, agrochemical compositions can include, but is not limited to, aerosols and/or aerosolized products, e.g., sprays, fumigants, powders, dusts, and/or gases; seed dressings; oral preparations (e.g., insect food, etc.); transgenic organisms expressing and/or producing a CRIP and/or a CRIP ORF (either transiently and/or stably) and a peptide IA, e.g., a plant or an animal.

[1030] In some embodiments, combinations or compositions comprising one or more of CRIPs: A1-A68 and one or more of IAs: B1-B479 can be used concomitantly, or sequentially with other insecticides proteins, and/or pesticides as described herein.

[1031] In some embodiments, a composition or combination can comprise a combination of one or more of CRIPs: A1-A68 and one or more of IAs: B1-B479, and one or more peptides or polypeptides from another organism.

[1032] For example, in some embodiments, a combination or composition can comprise a combination of one or more of CRIPs: A1-A68 and one or more of IAs: B1-B479, and one or more peptides or polypeptides from a spider, a scorpion, a sea anemone, a cone shell, a snake, a lizard, or a jellyfish.

[1033] In some embodiments, the active ingredients of the present disclosure can be applied in the form of compositions and can be applied to the crop area or plant to be treated, simultaneously or in succession, with other compounds. These compounds can be fertilizers, weed killers, cryoprotectants, surfactants, detergents, pesticidal soaps, dormant oils, polymers, and/or time-release or biodegradable carrier formulations that permit long-term dosing of a target area following a single application of the formulation. They can also be selective herbicides, chemical insecticides, virucides, microbicides, amoebicides, pesticides, fungicides, bacteriocides, nematocides, molluscicides or mixtures of several of these preparations, if desired, together with further agriculturally acceptable carriers, surfactants or application-promoting adjuvants customarily employed in the art of formulation. Suitable carriers and adjuvants can be solid or liquid and correspond to the substances ordinarily employed in formulation technology, e.g. natural or regenerated mineral substances, solvents, dispersants, wetting agents, tackifiers, binders or fertilizers. Likewise, the formulations may be prepared into edible “baits” or fashioned into pest “traps” to permit feeding or ingestion by a target pest of the pesticidal formulation.

[1034] Methods of applying an active ingredient of the present disclosure or an agrochemical composition of the present disclosure that contains a combination of one or more of CRIPs: A1-A68 and one or more of IAs: B1-B479 produced by the methods described herein of the present disclosure include leaf application, seed coating and soil application. In some embodiments, the number of applications and the rate of application depend on the intensity of infestation by the corresponding pest.

[1035] The composition may be formulated as a powder, dust, pellet, granule, spray, emulsion, colloid, solution, or such like, and may be prepared by such conventional means as desiccation, lyophilization, homogenization, extraction, filtration, centrifugation, sedimentation, or concentration of a culture of cells comprising the polypeptide. In all such compositions that contain at least one such pesticidal polypeptide, the polypeptide may be present in a concentration of from about 1% to about 99% by weight.

[1036] In some embodiments, compositions containing a combination of one or more of CRIPs: A1-A68 and one or more of IAs: B1-B479 may be prophylactically applied to an environmental area to prevent infestation by a susceptible pest, for example, a lepidopteran and/or coleopteran pest, which may be killed or reduced in numbers in a given area by the methods of the invention. In some embodiments, the pest ingests, or comes into contact with, a pesticidally-effective amount of the polypeptide.

[1037] In some embodiments, the pesticide compositions described herein may be made by formulating either the bacterial, yeast, or other cell, crystal and/or spore suspension, or isolated protein component with the desired agriculturally-acceptable carrier. The compositions may be formulated prior to administration in an appropriate means such as lyophilized, freeze-dried, desiccated, or in an aqueous carrier, medium or suitable diluent, such as saline and/or other buffer. In some embodiments, the formulated compositions may be in the form of a dust or granular material, or a suspension in oil (vegetable or mineral), or water or oil/water emulsions, or as a wettable powder, or in combination with any other carrier material suitable for agricultural application. Suitable agricultural carriers can be solid or liquid and are well known in the art. In some embodiments, the formulations may be mixed with one or more solid or liquid adjuvants and prepared by various means, e.g., by homogeneously mixing, blending and/or grinding the pesticidal composition with suitable adjuvants using conventional formulation techniques. Suitable formulations and application methods are described in U.S. Pat. No. 6,468,523, herein incorporated by reference in its entirety.

[1038] In some embodiments, a composition comprising a combination of one or more of CRIPs: A1-A68 and one or more of IAs: B1-B479 may also comprise additional ingredients, for example, herbicides, chemical insecticides, virucides, microbicides, amoebicides, pesticides, fungicides, bacteriocides, nematocides, molluscicides, polypeptides, and/or one or more of the foregoing mixtures thereof.

[1039] In some embodiments, a combination of the present invention can be included in a formulation, for example, a formulation composed of a polar aprotic solvent, and or water, and or where the polar aprotic solvent is present in an amount of 1-99 wt %, the polar protic solvent is present in an amount of 1-99 wt %, and the water is present in an amount of 0-98 wt %. The polar aprotic solvent formulations are especially effective when they contain MSO. MSO is a methylated seed oil and surfactant blend that uses methyl esters of soya oil in amounts of between about 80 and 85 percent petroleum oil with 15 to 20 percent surfactant.

[1040] In some embodiments, a combination of the present invention comprises two types of components, wherein the first type of component is an Insecticidal Agent (IA), and the second type of components is a Cysteine Rich Insecticidal Peptide (CRIP), wherein neither the IA nor CRIP are part of a fusion protein; and wherein the combination results in a insecticidal effect; wherein the ratio of IA to CRIP is about 10,000:1, 5,000:1, 1,000:1, 500:1, 250:1, 200:1, 100:1, 99:1, 95:5, 90:10, 85:15, 80:20, 75:25, 70:30, 65:35, 60:40, 55:45, 1:1, 45:55, 40:60, 35:65, 30:70, 25:75, 20:80, 15:85, 10:90, 5:95, 1:99, 1:100, 1:200, 1:250, 1:500, 1:1,000, 1:5,000, or 1:10,000.

[1041] Combinations: Sea Anemone Toxins and Insecticidal Agents (IAs)

[1042] In some embodiments, a combination or composition comprises an Insecticidal Agent (IA) (e.g., one or more of IAs: B1-B479 in Table B), and one or more polypeptides derived from a sea anemone. For example, in some embodiments, the sea anemone polypeptides can be isolated from: Actinia equina; Anemonia erythraea; Anemonia sulcata; Anemonia viridis; Anthopleura elegantissima; Anthopleura fuscoviridis; Anthopleura xanthogrammica; Bunodosoma caissarum; Bunodosoma cangicum; Bunodosoma granulifera; Heteractis crispa; Parasicyonis actinostoloides; Radianthus paumotensis; or Stoichactis helianthus. In yet other embodiments, the sea anemone toxin can be Av2; an Av3; or a variant thereof.

[1043] In some embodiments, a combination or composition comprises an Insecticidal Agent (IA) (e.g., one or more of IAs: B1-B479 in Table B), and one or more of the following sea anemone toxins: Toxin AETX-1 (AETX I), Toxin APETx1, Toxin APETx2, Antihypertensive protein BDS-1 (Blood depressing substance I), Antihypertensive protein BDS-2 (Blood depressing substance II), Neurotoxin Bg-2 (Bg II), Neurotoxin Bg-3 (Bg III), Toxin APE 1-1, Toxin APE 1-2, Neurotoxin-1 (Toxin ATX-I), Neurotoxin-1 (Neurotoxin I), Neurotoxin 1 (Toxin RTX-I), Neurotoxin 1 (Toxin SHP-I), Toxin APE 2-1, Toxin APE 2-2, Neurotoxin-2 (Toxin ATX-II), (aka AV2)Neurotoxin-2 (Toxin AFT-II), Neurotoxin 2 (Toxin RTX-II), Neurotoxin 2 (Neurotoxin II), Neurotoxin 3 homolog (Neurotoxin III homolog), Neurotoxin 3 (Toxin RTX-III), Neurotoxin 3 (Neurotoxin-III), Neurotoxin 4 (Toxin RTX-IV), Neurotoxin-5 (Toxin ATX-V), Neurotoxin 5 (Toxin RTX-V), Anthopleurin-A (Toxin AP-A), Anthopleurin-B (Toxin AP-B), Anthopleurin-C (Toxin AP-C), Potassium channel toxin Aek, Potassium channel toxin Bgk, Major neurotoxin BcIII, Neurotoxin BcIV, Cangitoxin (CGTX), Potassium channel toxin ShK, Toxin PCR1 (PCR1-2), Toxin PCR2 (PCR2-5), Toxin PCR3 (PCR2-1), Toxin PCR4 (PCR2-10), Toxin PCR6 (PCR3-7), Cangitoxin-2 (Cangitoxin II), or Cangitoxin-3 (Cangitoxin III).

[1044] In some embodiments, a combination or composition comprises an Insecticidal Agent (IA) (e.g., one or more of IAs: B1-B479 in Table B), and one or more sea anemone polypeptides having an amino acid sequence as set forth in SEQ ID NOs: 371-411.

[1045] In some embodiments, a combination or composition comprises an Insecticidal Agent (IA) (e.g., one or more of IAs: B1-B479 in Table B), and one or more polypeptides derived from the sea anemone, Anemonia viridis, which possesses a variety of toxins that it uses to defend itself. One of the toxins derived from Anemonia viridis is the neurotoxin “Av3.” Av3 is a type III sea anemone toxin that inhibits the inactivation of voltage-gated sodium (Na t) channels at receptor site 3, resulting in contractile paralysis. The binding of an Av3 toxin to site 3 results in the inactivated state of the sodium channel to become destabilized, which in turn causes the channel to remain in the open position (see Blumenthal et al., Voltage-gated sodium channel toxins: poisons, probes, and future promise. Cell Biochem Biophys. 2003; 38(2):215-38). Av3 shows high selectivity for crustacean and insect sodium channels, and low selectivity for mammalian sodium channels (see Moran et al., Sea anemone toxins affecting voltage-gated sodium channels—molecular and evolutionary features, Toxicon. 2009 Dec. 15; 54(8): 1089-1101).

[1046] An exemplary Av3 polypeptide from Anemonia viridis is provided having the amino acid sequence of SEQ ID NO:44. The ratio of AVP to Insecticidal Agent (IA) (e.g., one or more of IAs: B1-B479 in Table B), on a dry weight basis, can be selected from at least about the following ratios: 10,000:1, 5,000:1, 1,000:1, 500:1, 250:1, 200:1, 100:1, 99:1, 95:5, 90:10, 85:15, 80:20, 75:25, 70:30, 65:35, 60:40, 55:45, 1:1, 45:55, 40:60, 35:65, 30:70, 25:75, 20:80, 15:85, 10:90, 5:95, 1:99, 1:100, 1:200, 1:250, 1:500, 1:1,000, 1:5,000, or 1:10,000, or any combination of any two of these values. The total concentration of AVP and Insecticidal Agent (IA) (e.g., one or more of IAs: B1-B479 in Table B) in the composition is selected from the following percent concentrations: 0, 1, 5, 10, 15, 20, 25, 30, 35, 40, 45, 50, 55, 60, 65, 70, 75, 80, 85, 90, 95, 99 or 100%, or any range between any two of these values, and the remaining percentage of the composition is comprised of excipients.

[1047] In some embodiments, a combination or composition comprises a Insecticidal Agent (IA) (e.g., one or more of IAs: B1-B479 in Table B) and one or more polypeptides derived from the sea anemone Av3, for example, one or more of the Av3 variant polypeptide (AVP) can have the following amino acid variation from SEQ ID NO:44: an N-terminal amino acid substitution of R1K relative to SEQ ID NO:44, changing the polypeptide sequence from the wild-type “RSCCPCYWGGCPWGQNCYPEGCSGPKV” to “KSCCPCYWGGCPWGQNCYPEGCSGPKV” (SEQ ID NO:45); C-terminal amino acid can be deleted relative to SEQ ID NO:44, changing the polypeptide sequence from the wild-type “RSCCPCYWGGCPWGQNCYPEGCSGPKV” to “RSCCPCYWGGCPWGQNCYPEGCSGPK” (SEQ ID NO:46); and/or an N-terminal mutation and a C-terminal mutation, wherein the N-terminal amino acid can have a substitution of R1K relative to SEQ ID NO:44, and the C-terminal amino acid can be deleted relative to SEQ ID NO:44, changing the polypeptide sequence from the wild-type “RSCCPCYWGGCPWGQNCYPEGCSGPKV” to “KSCCPCYWGGCPWGQNCYPEGCSGPK” (SEQ ID NO:47).

[1048] The ratio of AVP to Insecticidal Agent (IA) (e.g., one or more of IAs: B1-B479 in Table B), on a dry weight basis, can be selected from at least about the following ratios: 10,000:1, 5,000:1, 1,000:1, 500:1, 250:1, 200:1, 100:1, 99:1, 95:5, 90:10, 85:15, 80:20, 75:25, 70:30, 65:35, 60:40, 55:45, 1:1, 45:55, 40:60, 35:65, 30:70, 25:75, 20:80, 15:85, 10:90, 5:95, 1:99, 1:100, 1:200, 1:250, 1:500, 1:1,000, 1:5,000, or 1:10,000, or any combination of any two of these values. The total concentration of AVP and Insecticidal Agent (IA) (e.g., one or more of IAs: B1-B479 in Table B) in the composition is selected from the following percent concentrations: 0, 1, 5, 10, 15, 20, 25, 30, 35, 40, 45, 50, 55, 60, 65, 70, 75, 80, 85, 90, 95, 99 or 100%, or any range between any two of these values, and the remaining percentage of the composition is comprised of excipients.

[1049] In some embodiments, the method of controlling an insect comprises: applying AVP to an insect; and applying an Insecticidal Agent (IA) (e.g., one or more of IAs: B1-B479 in Table B) to said insect. The foregoing application can be applied concomitantly and/or sequentially, and either in the same or separate compositions. In some embodiments, AVP and the Insecticidal Agent (IA) (e.g., one or more of IAs: B1-B479 in Table B) may be applied to insecticidal-resistant insects (e.g., Bt-resistant insects). The ratio of AVP to Insecticidal Agent (IA) (e.g., one or more of IAs: B1-B479 in Table B), on a dry weight basis, can be selected from at least about the following ratios: 10,000:1, 5,000:1, 1,000:1, 500:1, 250:1, 200:1, 100:1, 99:1, 95:5, 90:10, 85:15, 80:20, 75:25, 70:30, 65:35, 60:40, 55:45, 1:1, 45:55, 40:60, 35:65, 30:70, 25:75, 20:80, 15:85, 10:90, 5:95, 1:99, 1:100, 1:200, 1:250, 1:500, 1:1,000, 1:5,000, or 1:10,000, or any combination of any two of these values. The total concentration of AVP and Insecticidal Agent (IA) (e.g., one or more of IAs: B1-B479 in Table B) in the composition is selected from the following percent concentrations: 0, 1, 5, 10, 15, 20, 25, 30, 35, 40, 45, 50, 55, 60, 65, 70, 75, 80, 85, 90, 95, 99 or 100%, or any range between any two of these values, and the remaining percentage of the composition is comprised of excipients.

[1050] In some embodiments, an illustrative Av3 peptide or variant thereof is described in the Applicant's PCT application (Application No. PCT/US19/51093) filed Sep. 13, 2019, entitled “Av3 Mutant Insecticidal Polypeptides and Methods for Producing and Using Same,” the disclosure of which, and the disclosure of Av3 peptides or variants thereof, are described and are incorporated by reference herein in its entirety.

[1051] In some embodiments, a combination or composition comprises an Insecticidal Agent (IA) (e.g., one or more of IAs: B1-B479 in Table B), and one or more sea anemone peptides having an amino acid sequence that is at least 50% identical, at least 55% identical, at least 60% identical, at least 65% identical, at least 70% identical, at least 75% identical, at least 80% identical, at least 81% identical, at least 82% identical, at least 83% identical, at least 84% identical, at least 85% identical, at least 86% identical, at least 87% identical, at least 88% identical, at least 89% identical, at least 90% identical, at least 91% identical, at least 92% identical, at least 93% identical, at least 94% identical, at least 95% identical, at least 96% identical, at least 97% identical, at least 98% identical, at least 99% identical, at least 99.5% identical, at least 99.6% identical, at least 99.7% identical, at least 99.8% identical, at least 99.9% identical, or 100% identical to an amino acid sequence set forth in SEQ ID NOs: 44-47, and 371-411.

[1052] Combinations: Spider Toxins and Insecticidal Agents (IAs)

[1053] In some embodiments, a combination or composition comprises an Insecticidal Agent (IA) (e.g., one or more of IAs: B1-B479 in Table B) and one or more polypeptides derived, isolated, and/or originating from a spider.

[1054] In some embodiments, the spider toxin can be isolated from one of the following species: Phoneutria nigriventer; Allagelena opulenta; Cupiennius salei; Plectreurys tristis; Coremiocnemis vanda; Haplopelma huwenum; Agelena orientalis; Allagelena opulenta; Segestria florentina; Apomastus schlingeri; Phoneutria keyserlingi; Macrothele gigas; Macrothele raveni; Missulena bradleyi; Pireneitega luctuosa; Phoneutria reidyi; Illawara wisharti; Eucratoscelus constrictus; Agelenopsis aperta; Hololena curta; Oxyopes lineatus; Brachypelma albiceps; or Brachypelma smithi.

[1055] In some embodiments, the spider toxin can be isolated from Hadronyche versuta (also known as the Blue Mountain funnel web spider), Hadronyche venenata, Atrax robustus, Atrax formidabilis, or Atrax infensus.

[1056] In some embodiments, an Insecticidal Agent (IA) (e.g., one or more of IAs: B1-B479 in Table B) can be combined with one or more of the following one of the following spider toxins: U13-ctenitoxin-Pn1a, U13-ctenitoxin-Pn1b,U13-ctenitoxin-Pn1c, U1-agatoxin-Aop1a, U1-ctenitoxin-Cs1a, U1-nemetoxin-Csp1a, U1-nemetoxin-Csp1b, U1-nemetoxin-Csp1c, U1-plectoxin-Pt1a, U1-plectoxin-Pt1b, U1-plectoxin-Pt1c, U1-plectoxin-Pt1d, U1-plectoxin-Pt1f, U1-theraphotoxin-Cv1a, U1-theraphotoxin-Hh1a_1, U1-theraphotoxin-Hh1a_2, U1-theraphotoxin-Hh1a_3, U1-theraphotoxin-Hh1b, U1-theraphotoxin-Hh1c_1, U1-theraphotoxin-Hh1c_2, U1-theraphotoxin-Hh1d, U1-theraphotoxin-Hh1e, U1-theraphotoxin-Hh1f_1, U1-theraphotoxin-Hh1f_2, U1-theraphotoxin-Hh1f_3, U1-theraphotoxin-Hh1f_4, U1-theraphotoxin-Hh1g, U2-agatoxin-Ao1a, U2-agatoxin-Aop1a, U2-ctenitoxin-Cs1a, U2-ctenitoxin-Pn1a, U2-cyrtautoxin-As1a, U2-segestritoxin-Sf1a, U2-segestritoxin-Sf1b, U2-segestritoxin-Sf1c, U2-segestritoxin-Sf1d, U2-segestritoxin-Sf1e, U2-segestritoxin-Sf1f, U2-segestritoxin-Sf1g, U2-segestritoxin-Sf1h, U2-theraphotoxin-Hh1a, U3-cyrtautoxin-As1a, U3-plectoxin-Pt1a, U5-ctenitoxin-Pn1a, U7-ctenitoxin-Pk1a, β-hexatoxin-Mg1a, β-hexatoxin-Mr1a, Γ-ctenitoxin-Pn1a, δ-actinopoditoxin-Mb1a, δ-Amaurobitoxin-Pl1a, δ-Amaurobitoxin-Pl1b, δ-Amaurobitoxin-Pl1c, δ-Amaurobitoxin-Pl1d, δ-ctenitoxin-Asp2e, δ-ctenitoxin-Pn1a_1, δ-ctenitoxin-Pn1a_2, δ-ctenitoxin-Pn1b, δ-ctenitoxin-Pn2a, δ-ctenitoxin-Pn2b, δ-ctenitoxin-Pn2cδ-ctenitoxin-Pr2d, δ-hexatoxin-Aria, δ-hexatoxin-Hv1a, δ-hexatoxin-Hv1b, δ-hexatoxin-Iw1a, δ-hexatoxin-Mg1a, δ-hexatoxin-Mg1b, κ-hexatoxin-Hf1a, κ-hexatoxin-Hv1a, κ-hexatoxin-Hv1b, hexatoxin-Hv1c_1, κ-hexatoxin-Hv1c_2, κ-hexatoxin-Hv1c_3, κ-hexatoxin-Hv1c_4, κ-hexatoxin-Hv1d, κ-hexatoxin-Hv1e, κ-theraphotoxin-Ec2a, κ-theraphotoxin-Ec2b, μ-agatoxin-Aa1a, μ-agatoxin-Aa1b, μ-agatoxin-Aa1c, μ-agatoxin-Aa1d, μ-agatoxin-Aa1e, μ-agatoxin-Aa1f, μ-agatoxin-Hc1a, μ-agatoxin-Hc1b, μ-agatoxin-Hc1c, μ-hexatoxin-Mg1a, μ-hexatoxin-Mg1b, μ-hexatoxin-Mg1c, μ-hexatoxin-Mg2a, μ-theraphotoxin-Hh1a, ω-actinopoditoxin-Mb1a, ω-agatoxin-Aa4a, ω-agatoxin-Aa4b, ω-agatoxin-Aa4c, ω-hexatoxin-Ar1a_1, ω-hexatoxin-Aria 3, ω-hexatoxin-Ar1b_1, ω-hexatoxin-Ar1d_1, ω-hexatoxin-Ar1d_4, ω-hexatoxin-Ar1e_1 ω-hexatoxin-Ar1f, ω-hexatoxin-Ar1g_1, ω-hexatoxin-Ar1h, ω-hexatoxin-Ar2a, ω-hexatoxin-Ar2b, ω-hexatoxin-Ar2c, ω-hexatoxin-Ar2d, ω-hexatoxin-Ar2e_1, ω-hexatoxin-Ar2e_2, ω-atracotoxin-Asp2a, ω-hexatoxin-Asp2b, ω-hexatoxin-Hf1a, ω-hexatoxin-Hi1a_1, ω-hexatoxin-Hi1a_2, ω-hexatoxin-Hi1a_3, ω-hexatoxin-Hilb 1, ω-hexatoxin-Hi1b_10, ω-hexatoxin-Hi1b_2, ω-hexatoxin-Hi1b_5, ω-hexatoxin-Hi1b_8, ω-hexatoxin-Hi1c_1, ω-hexatoxin-Hi1c_2, ω-hexatoxin-Hv1a, ω-hexatoxin-Hv1b, ω-hexatoxin-Hv1c, ω-hexatoxin-Hv1d, ω-hexatoxin-Hv1e, ω-hexatoxin-Hv1f, ω-hexatoxin-Hv1g_1, ω-hexatoxin-Hv1g_5ω-hexatoxin-Hv1g_6ω-hexatoxin-Hv2a, ω-hexatoxin-Hv2b_1, ω-hexatoxin-Hv2b_2, ω-hexatoxin-Hv2b_3, ω-hexatoxin-Hv2b_4, ω-hexatoxin-Hv2b_5, ω-hexatoxin-Hv2b_6, ω-hexatoxin-Hv2b_7, ω-hexatoxin-Hv2c, ω-hexatoxin-Hv2d_1, ω-hexatoxin-Hv2d_2, ω-hexatoxin-Hv2d_3, ω-hexatoxin-Hv2e, ω-hexatoxin-Hv2f, ω-hexatoxin-Hv2g, ω-hexatoxin-Hv2h_1, ω-hexatoxin-Hv2h_2, ω-hexatoxin-Hv2i, ω-hexatoxin-Hv2j_1, ω-hexatoxin-Hv2j_2, ω-hexatoxin-Hv2k, ω-hexatoxin-Hv2l, ω-hexatoxin-Hv2m_1, ω-hexatoxin-Hv2m_2, ω-hexatoxin-Hv2m_3, ω-hexatoxin-Hv2n, ω-hexatoxin-Hv2o, ω-hexatoxin-Hvn1a, ω-hexatoxin-Hvn1b_1, ω-hexatoxin-Hvn1b_2, ω-hexatoxin-Hvn1b_3, ω-hexatoxin-Hvn1b_4, ω-hexatoxin-Hvn1b_6, ω-hexatoxin-Iw2a, ω-oxotoxin-Ol1b, ω-plectoxin-Pt1a, ω-theraphotoxin-Asp1a, ω-theraphotoxin-Asp1f, ω-theraphotoxin-Asp1g, ω-theraphotoxin-Ba1a, ω-theraphotoxin-Ba1b, ω-theraphotoxin-Bs1a, ω-theraphotoxin-Bs2a, or ω-theraphotoxin-Hh2a.

[1057] In some embodiments, an Insecticidal Agent (IA) (e.g., one or more of IAs: B1-B479 in Table B) can be combined with one or more spider toxins having an amino acid as set forth in SEQ ID NOs: 192-278, and 281-370.

[1058] In some embodiments, an Insecticidal Agent (IA) (e.g., one or more of IAs: B1-B479 in Table B) can be combined with one or more ACTX peptides.

[1059] In some embodiments, an Insecticidal Agent (IA) (e.g., one or more of IAs: B1-B479 in Table B) can be combined with one or more of the following ACTX peptides: U-ACTX-Hv1a, U+2-ACTX-Hv1a, rU-ACTX-Hv1a, rU-ACTX-Hv1b, rκ-ACTX-Hv1c, co-ACTX-Hv1a, and/or ω-ACTX-Hv1a+2.

[1060] Exemplary ACTX peptides include: U-ACTX-Hv1a, having the amino acid sequence “QYCVPVDQPCSLNTQPCCDDATCTQERNENGHTVYYCRA” (SEQ ID NO: 60); U+2-ACTX-Hv1a, having the amino acid sequence “GSQYCVPVDQPCSLNTQPCCDDATCTQERNENGHTVYYCRA” (SEQ ID NO: 61); Omega-ACTX-Hv1a, having the amino acid sequence “SPTCIPSGQPCPYNENCCSQSCTFKENENGNTVKRCD” (SEQ ID NO: 62); Omega-hexatoxin-Ar1d, having the amino acid sequence “GSSPTCIPSGQPCPYNENCCSQSCTFKENENGNTVKRCD” (SEQ ID NO: 63); and Kappa-hexatoxin-Hv1c, having the amino acid sequence “GSAICTGADRPCAACCPCCPGTSCKAESNGVSYCRKDEP” (SEQ ID NO: 64).

[1061] In some embodiments, an Insecticidal Agent (IA) (e.g., one or more of IAs: B1-B7, B9-B40, and B42-B479 in Table B) can be combined with one or more of the aforementioned exemplary ACTX peptides.

[1062] In some embodiments, a combination or composition comprises an Insecticidal Agent (IA) (e.g., one or more of IAs: B1-B479 in Table B), and one or more U-ACTX peptides, Omega-ACTX peptides, and/or Kappa-ACTX peptides. The ratio of ACTX peptides to Insecticidal Agent (IA) (e.g., one or more of IAs: B1-B7, B9-B40, and B42-B479 in Table B), on a dry weight basis, can be selected from at least about the following ratios: 10,000:1, 5,000:1, 1,000:1, 500:1, 250:1, 200:1, 100:1, 99:1, 95:5, 90:10, 85:15, 80:20, 75:25, 70:30, 65:35, 60:40, 55:45, 1:1, 45:55, 40:60, 35:65, 30:70, 25:75, 20:80, 15:85, 10:90, 5:95, 1:99, 1:100, 1:200, 1:250, 1:500, 1:1,000, 1:5,000, or 1:10,000, or any combination of any two of these values. The total concentration of ACTX and Insecticidal Agent (IA) (e.g., one or more of IAs: B1-B479 in Table B) in the composition is selected from the following percent concentrations: 0, 1, 5, 10, 15, 20, 25, 30, 35, 40, 45, 50, 55, 60, 65, 70, 75, 80, 85, 90, 95, 99 or 100%, or any range between any two of these values, and the remaining percentage of the composition is comprised of excipients.

[1063] In some embodiments, the method of controlling an insect comprises: applying an ACTX peptide to an insect; and applying an Insecticidal Agent (IA) (e.g., one or more of IAs: B1-B479 in Table B) to said insect. The foregoing application can be applied concomitantly and/or sequentially, and either in the same or separate compositions. In some embodiments, ACTX peptide and the Insecticidal Agent (IA) (e.g., one or more of IAs: B1-B479 in Table B) may be applied to insecticidal-resistant insects (e.g., Bt-resistant insects). The ratio of ACTX peptide to Insecticidal Agent (IA) (e.g., one or more of IAs: B1-B479 in Table B), on a dry weight basis, can be selected from at least about the following ratios: 10,000:1, 5,000:1, 1,000:1, 500:1, 250:1, 200:1, 100:1, 99:1, 95:5, 90:10, 85:15, 80:20, 75:25, 70:30, 65:35, 60:40, 55:45, 1:1, 45:55, 40:60, 35:65, 30:70, 25:75, 20:80, 15:85, 10:90, 5:95, 1:99, 1:100, 1:200, 1:250, 1:500, 1:1,000, 1:5,000, or 1:10,000, or any combination of any two of these values. The total concentration of ACTX peptide and Insecticidal Agent (IA) (e.g., one or more of IAs: B1-B479 in Table B) in the composition is selected from the following percent concentrations: 0, 1, 5, 10, 15, 20, 25, 30, 35, 40, 45, 50, 55, 60, 65, 70, 75, 80, 85, 90, 95, 99 or 100%, or any range between any two of these values, and the remaining percentage of the composition is comprised of excipients.

[1064] In some embodiments, a combination or composition comprises an Insecticidal Agent (IA) (e.g., one or more of IAs: B1-B479 in Table B) and one or more spider toxins having an amino acid sequence that is at least 50% identical, at least 55% identical, at least 60% identical, at least 65% identical, at least 70% identical, at least 75% identical, at least 80% identical, at least 81% identical, at least 82% identical, at least 83% identical, at least 84% identical, at least 85% identical, at least 86% identical, at least 87% identical, at least 88% identical, at least 89% identical, at least 90% identical, at least 91% identical, at least 92% identical, at least 93% identical, at least 94% identical, at least 95% identical, at least 96% identical, at least 97% identical, at least 98% identical, at least 99% identical, at least 99.5% identical, at least 99.6% identical, at least 99.7% identical, at least 99.8% identical, at least 99.9% identical, or 100% identical to an amino acid sequence set forth in SEQ ID NOs: 192-278 and 281-370.

[1065] In some embodiments, a combination or composition comprises an Insecticidal Agent (IA) (e.g., one or more of IAs: B1-B7, B9-B40, and B42-B479 in Table B) and one or more ACTX peptides having an amino acid sequence that is at least 50% identical, at least 55% identical, at least 60% identical, at least 65% identical, at least 70% identical, at least 75% identical, at least 80% identical, at least 81% identical, at least 82% identical, at least 83% identical, at least 84% identical, at least 85% identical, at least 86% identical, at least 87% identical, at least 88% identical, at least 89% identical, at least 90% identical, at least 91% identical, at least 92% identical, at least 93% identical, at least 94% identical, at least 95% identical, at least 96% identical, at least 97% identical, at least 98% identical, at least 99% identical, at least 99.5% identical, at least 99.6% identical, at least 99.7% identical, at least 99.8% identical, at least 99.9% identical, or 100% identical to an amino acid sequence set forth in SEQ ID NOs: 60-64, and 594.

[1066] Γ-CNTX-Pn1a and Insecticidal Agents (IAs)

[1067] In some preferred embodiments, an Insecticidal Agent (IA) (e.g., one or more of IAs: B1-B479 in Table B) can be combined with one or more Γ-CNTX-Pn1a or γ-CNTX-Pn1a toxins. The Γ-CNTX-Pn1a peptide is an insecticidal neurotoxin derived from the Brazilian armed spider, Phoneutria nigriventer. Γ-CNTX-Pn1a targets the N-methyl-D-aspartate (NMDA)-subtype of ionotropic glutamate receptor (GRIN), and sodium channels. An exemplary Γ-CNTX-Pn1a peptide has an amino acid sequence of

(SEQ ID NO: 65)
MKVAIVFLSLLVLAFASESIEENREEFPVEESARCADINGACKSDCDCC
GDSVTCDCYWSDSCKCRESNFKIGMAIRKKFC.

[1068] In some embodiments, the method of controlling an insect comprises: applying Γ-CNTX-Pn1a to an insect; and applying an IA to said insect. The foregoing application can be applied concomitantly and/or sequentially, and either in the same or separate compositions. In some embodiments, Γ-CNTX-Pn1a and Insecticidal Agent (IA) (e.g., one or more of IAs: B1-B479 in Table B) may be applied to (Γ-CNTX-Pn1a)-resistant insects. In some embodiments, Γ-CNTX-Pn1a and Insecticidal Agent (IA) (e.g., one or more of IAs: B1-B479 in Table B) may be applied to (Bt toxin)-resistant insects. The ratio of F-CNTX-Pn1a to IA, on a dry weight basis, can be selected from at least about the following ratios: 10,000:1, 5,000:1, 1,000:1, 500:1, 250:1, 200:1, 100:1, 99:1, 95:5, 90:10, 85:15, 80:20, 75:25, 70:30, 65:35, 60:40, 55:45, 1:1, 45:55, 40:60, 35:65, 30:70, 25:75, 20:80, 15:85, 10:90, 5:95, 1:99, 1:100, 1:200, 1:250, 1:500, 1:1,000, 1:5,000, or 1:10,000, or any combination of any two of these values. The total concentration of Γ-CNTX-Pn1a and TVP in the composition is selected from the following percent concentrations: 0, 1, 5, 10, 15, 20, 25, 30, 35, 40, 45, 50, 55, 60, 65, 70, 75, 80, 85, 90, 95, 99 or 100%, or any range between any two of these values, and the remaining percentage of the composition is comprised of excipients.

[1069] In some embodiments, the combination or composition comprises both a F-CNTX-Pn1a and an Insecticidal Agent (IA) (e.g., one or more of IAs: B1-B479 in Table B). The combination or composition can be in the ratio of Γ-CNTX-Pn1a to Insecticidal Agent (IA) (e.g., one or more of IAs: B1-B479 in Table B), on a dry weight basis, from about any or all of the following ratios: 10,000:1, 5,000:1, 1,000:1, 500:1, 250:1, 200:1, 100:1, 99:1, 95:5, 90:10, 85:15, 80:20, 75:25, 70:30, 65:35, 60:40, 55:45, 1:1, 45:55, 40:60, 35:65, 30:70, 25:75, 20:80, 15:85, 10:90, 5:95, 1:99, 1:100, 1:200, 1:250, 1:500, 1:1,000, 1:5,000, or 1:10,000, or any combination of any two of these values. In some embodiments, the composition can have a ratio of Γ-CNTX-Pn1a to Insecticidal Agent (IA) (e.g., one or more of IAs: B1-B479 in Table B), on a on a dry weight basis, selected from about the following ratios: 0:50, 45:55, 40:60, 35:65, 30:70, 25:75, 20:80, 15:85, 10:90, 5:95, 1:99, 0.5:99.5, 0.1:99.9 and 0.01:99.99 or any combination of any two of these values.

[1070] In some embodiments, a combination or composition comprises an Insecticidal Agent (IA) (e.g., one or more of IAs: B1-B479 in Table B) and one or more F-CNTX-Pn1a peptides having an amino acid sequence that is at least 50% identical, at least 55% identical, at least 60% identical, at least 65% identical, at least 70% identical, at least 75% identical, at least 80% identical, at least 81% identical, at least 82% identical, at least 83% identical, at least 84% identical, at least 85% identical, at least 86% identical, at least 87% identical, at least 88% identical, at least 89% identical, at least 90% identical, at least 91% identical, at least 92% identical, at least 93% identical, at least 94% identical, at least 95% identical, at least 96% identical, at least 97% identical, at least 98% identical, at least 99% identical, at least 99.5% identical, at least 99.6% identical, at least 99.7% identical, at least 99.8% identical, at least 99.9% identical, or 100% identical to an amino acid sequence set forth in SEQ ID NOs: 65.

[1071] Wild-Type U1-Agatoxins, TVPs, and Insecticidal Agents (IAs)

[1072] In some embodiments, a combination or composition comprises an Insecticidal Agent (IA) (e.g., one or more of IAs: B1-B479 in Table B) and one or more TVPs comprising an amino acid sequence that is at least 90%, or at least 95%, or at least 96%, or at least 97%, or at least 98%, or at least 99%, or 100% identical to the amino acid sequence according to Formula (I): E-P-D-E-I-C-R-X₁-X₂-M-X₃-N-K-E-F-T-Y-X₄-S-N-V-C-N-N-C-G-D-Q-V-A-A-C-E-A-E-C-F-X₅-N-D-V-Y-Z₁-A-C-H-E-A-Q-X₆-X₇, wherein the polypeptide comprises at least one amino acid substitution relative to the wild-type sequence of U1-agatoxin-Ta1b as set forth in SEQ ID NO:1, and wherein X₁ is A, S, or N; X₂ is R, Q, or N; X₃ is T or P; X₄ is K or A; X₅ is R or A; Z₁ is T or A; X₆ is K or absent; and X₇ is G or absent.

[1073] In some embodiments, a combination or composition comprises an Insecticidal Agent (IA) (e.g., one or more of IAs: B1-B479 in Table B) and one or more TVPs comprising an amino acid sequence that is at least 90%, or at least 95%, or at least 96%, or at least 97%, or at least 98%, or at least 99%, or 100% identical to the amino acid sequence according to Formula (I): E-P-D-E-I-C-R-X₁-X₂-M-X₃-N-K-E-F-T-Y-X₄-S-N-V-C-N-N-C-G-D-Q-V-A-A-C-E-A-E-C-F-X₅-N-D-V-Y-Z₁-A-C-H-E-A-Q-X₆-X₇, wherein the polypeptide comprises at least one amino acid substitution relative to the wild-type sequence of U1-agatoxin-Ta1b as set forth in SEQ ID NO:1, and wherein X₁ is A, S, or N; X₂ is R, Q, or N; X₃ is T or P; X₄ is K or A; X₅ is R or A; Z₁ is T or A; X₆ is K or absent; and X₇ is G or absent; and wherein the TVP has one amino acid substitution at X₁, X₂, X₃, X₄, or X₅.

[1074] In some embodiments, a combination or composition comprises an Insecticidal Agent (IA) (e.g., one or more of IAs: B1-B479 in Table B) and one or more TVPs comprising an amino acid sequence that is at least 90%, or at least 95%, or at least 96%, or at least 97%, or at least 98%, or at least 99%, or 100% identical to the amino acid sequence according to Formula (I): E-P-D-E-I-C-R-X₁-X₂-M-X₃-N-K-E-F-T-Y-X₄-S-N-V-C-N-N-C-G-D-Q-V-A-A-C-E-A-E-C-F-X₅-N-D-V-Y-Z₁-A-C-H-E-A-Q-X₆-X₇, wherein the polypeptide comprises at least one amino acid substitution relative to the wild-type sequence of U1-agatoxin-Ta1b as set forth in SEQ ID NO:1, and wherein X₁ is A, S, or N; X₂ is R, Q, or N; X₃ is T or P; X₄ is K or A; X₅ is R or A; Z₁ is T or A; X₆ is K or absent; and X₇ is G or absent; and wherein the TVP has one amino acid substitution at X₁, X₂, X₃, X₄, or X₅; and wherein X₇ is Glycine.

[1075] In some embodiments, a combination or composition comprises an Insecticidal Agent (IA) (e.g., one or more of IAs: B1-B479 in Table B) and one or more TVPs comprising an amino acid sequence that is at least 90%, or at least 95%, or at least 96%, or at least 97%, or at least 98%, or at least 99%, or 100% identical to the amino acid sequence according to Formula (I): E-P-D-E-I-C-R-X₁-X₂-M-X₃-N-K-E-F-T-Y-X₄-S-N-V-C-N-N-C-G-D-Q-V-A-A-C-E-A-E-C-F-X₅-N-D-V-Y-Z₁-A-C-H-E-A-Q-X₆-X₇, wherein the polypeptide comprises at least one amino acid substitution relative to the wild-type sequence of U1-agatoxin-Ta1b as set forth in SEQ ID NO:1, and wherein X₁ is A, S, or N; X₂ is R, Q, or N; X₃ is T or P; X₄ is K or A; X₅ is R or A; Z₁ is T or A; X₆ is K or absent; and X₇ is G or absent; and wherein the TVP has one amino acid substitution at X₁, X₂, X₃, X₄, or X₅; and wherein X₇ is absent.

[1076] In some embodiments, a combination or composition comprises an Insecticidal Agent (IA) (e.g., one or more of IAs: B1-B479 in Table B) and one or more TVPs comprising an amino acid sequence that is at least 90%, or at least 95%, or at least 96%, or at least 97%, or at least 98%, or at least 99%, or 100% identical to the amino acid sequence according to Formula (I): E-P-D-E-I-C-R-X₁-X₂-M-X₃-N-K-E-F-T-Y-X₄-S-N-V-C-N-N-C-G-D-Q-V-A-A-C-E-A-E-C-F-X₅-N-D-V-Y-Z₁-A-C-H-E-A-Q-X₆-X₇, wherein the polypeptide comprises at least one amino acid substitution relative to the wild-type sequence of U1-agatoxin-Ta1b as set forth in SEQ ID NO:1, and wherein X₁ is A, S, or N; X₂ is R, Q, or N; X₃ is T or P; X₄ is K or A; X₅ is R or A; Z₁ is T or A; X₆ is K or absent; and X₇ is G or absent; and wherein the TVP has one amino acid substitution at X₁, X₂, X₃, X₄, or X₅; and wherein X₆ and X₇ are absent.

[1077] In some embodiments, a combination or composition comprises an Insecticidal Agent (IA) (e.g., one or more of IAs: B1-B479 in Table B) and one or more TVPs comprising an amino acid sequence that is at least 90%, or at least 95%, or at least 96%, or at least 97%, or at least 98%, or at least 99%, or 100% identical to the amino acid sequence according to Formula (I): E-P-D-E-I-C-R-X₁-X₂-M-X₃-N-K-E-F-T-Y-X₄-S-N-V-C-N-N-C-G-D-Q-V-A-A-C-E-A-E-C-F-X₅-N-D-V-Y-Z₁-A-C-H-E-A-Q-X₆-X₇, wherein the polypeptide comprises at least one amino acid substitution relative to the wild-type sequence of U1-agatoxin-Ta1b as set forth in SEQ ID NO:1, and wherein X₁ is A, S, or N; X₂ is R, Q, or N; X₃ is T or P; X₄ is K or A; X₅ is R or A; Z₁ is T or A; X₆ is K or absent; and X₇ is G or absent; and wherein the TVP comprises an amino sequence as set forth in any one of SEQ ID NOs 2-15 or 49-53.

[1078] In some embodiments, a combination or composition comprises an Insecticidal Agent (IA) (e.g., one or more of IAs: B1-B479 in Table B) and one or more TVPs comprising an amino acid sequence that is at least 90%, or at least 95%, or at least 96%, or at least 97%, or at least 98%, or at least 99%, or 100% identical to the amino acid sequence according to Formula (I): E-P-D-E-I-C-R-X₁-X₂-M-X₃-N-K-E-F-T-Y-X₄-S-N-V-C-N-N-C-G-D-Q-V-A-A-C-E-A-E-C-F-X₅-N-D-V-Y-Z₁-A-C-H-E-A-Q-X₆-X₇, wherein the polypeptide comprises at least one amino acid substitution relative to the wild-type sequence of U1-agatoxin-Ta1b as set forth in SEQ ID NO:1, and wherein X₁ is A, S, or N; X₂ is R, Q, or N; X₃ is T or P; X₄ is K or A; X₅ is R or A; Z₁ is T or A; X₆ is K or absent; and X₇ is G or absent; and wherein the TVP is encoded by a polynucleotide sequence as set forth in any one of SEQ ID NOs 17-30 or 54-58, or a complementary nucleotide sequence thereof.

[1079] In some embodiments, a combination or composition comprises an Insecticidal Agent (IA) (e.g., one or more of IAs: B1-B479 in Table B) and one or more TVPs comprising an amino acid sequence that is at least 90%, or at least 95%, or at least 96%, or at least 97%, or at least 98%, or at least 99%, or 100% identical to the amino acid sequence according to Formula (I): E-P-D-E-I-C-R-X₁-X₂-M-X₃-N-K-E-F-T-Y-X₄-S-N-V-C-N-N-C-G-D-Q-V-A-A-C-E-A-E-C-F-X₅-N-D-V-Y-Z₁-A-C-H-E-A-Q-X₆-X₇, wherein the polypeptide comprises at least one amino acid substitution relative to the wild-type sequence of U1-agatoxin-Ta1b as set forth in SEQ ID NO:1, and wherein X₁ is A, S, or N; X₂ is R, Q, or N; X₃ is T or P; X₄ is K or A; X₅ is R or A; Z₁ is T or A; X₆ is K or absent; and X₇ is G or absent; and wherein the TVP further comprises a homopolymer or heteropolymer of two or more TVPs, wherein the amino acid sequence of each TVP is the same or different.

[1080] In some embodiments, a combination or composition comprises an Insecticidal Agent (IA) (e.g., one or more of IAs: B1-B479 in Table B) and one or more TVPs comprising an amino acid sequence that is at least 90%, or at least 95%, or at least 96%, or at least 97%, or at least 98%, or at least 99%, or 100% identical to the amino acid sequence according to Formula (I): E-P-D-E-I-C-R-X₁-X₂-M-X₃-N-K-E-F-T-Y-X₄-S-N-V-C-N-N-C-G-D-Q-V-A-A-C-E-A-E-C-F-X₅-N-D-V-Y-Z₁-A-C-H-E-A-Q-X₆-X₇, wherein the polypeptide comprises at least one amino acid substitution relative to the wild-type sequence of U1-agatoxin-Ta1b as set forth in SEQ ID NO:1, and wherein X₁ is A, S, or N; X₂ is R, Q, or N; X₃ is T or P; X₄ is K or A; X₅ is R or A; Z₁ is T or A; X₆ is K or absent; and X₇ is G or absent; and wherein the TVP is a fused protein comprising two or more TVPs separated by a cleavable or non-cleavable linker, and wherein the amino acid sequence of each TVP may be the same or different.

[1081] In some embodiments, a combination or composition comprises an Insecticidal Agent (IA) (e.g., one or more of IAs: B1-B479 in Table B) and one or more TVPs comprising an amino acid sequence that is at least 90%, or at least 95%, or at least 96%, or at least 97%, or at least 98%, or at least 99%, or 100% identical to the amino acid sequence according to Formula (I): E-P-D-E-I-C-R-X₁-X₂-M-X₃-N-K-E-F-T-Y-X₄-S-N-V-C-N-N-C-G-D-Q-V-A-A-C-E-A-E-C-F-X₅-N-D-V-Y-Z₁-A-C-H-E-A-Q-X₆-X₇, wherein the polypeptide comprises at least one amino acid substitution relative to the wild-type sequence of U1-agatoxin-Ta1b as set forth in SEQ ID NO:1, and wherein X₁ is A, S, or N; X₂ is R, Q, or N; X₃ is T or P; X₄ is K or A; X₅ is R or A; Z₁ is T or A; X₆ is K or absent; and X₇ is G or absent; and wherein the TVP is a fused protein comprising two or more TVPs separated by a cleavable or non-cleavable linker, and wherein the amino acid sequence of each TVP may be the same or different, and wherein the linker is cleavable inside the gut or hemolymph of an insect.

[1082] In some embodiments, a combination or composition comprises an Insecticidal Agent (IA) (e.g., one or more of IAs: B1-B479 in Table B) and one or more TVPs comprising an amino acid sequence that is at least 90%, or at least 95%, or at least 96%, or at least 97%, or at least 98%, or at least 99%, or 100% identical to the amino acid sequence according to Formula (I): E-P-D-E-I-C-R-X₁-X₂-M-X₃-N-K-E-F-T-Y-X₄-S-N-V-C-N-N-C-G-D-Q-V-A-A-C-E-A-E-C-F-X₅-N-D-V-Y-Z₁-A-C-H-E-A-Q-X₆-X₇, wherein the polypeptide comprises at least one amino acid substitution relative to the wild-type sequence of U1-agatoxin-Ta1b as set forth in SEQ ID NO:1, and wherein X₁ is A, S, or N; X₂ is R, Q, or N; X₃ is T or P; X₄ is K or A; X₅ is R or A; Z₁ is T or A; X₆ is K or absent; and X₇ is G or absent; and wherein if Z₁ is T then the TVP is glycosylated.

[1083] In some embodiments, a combination or composition comprises an Insecticidal Agent (IA) (e.g., one or more of IAs: B1-B479 in Table B) and one or more TVPs having an amino acid sequence that is at least 50% identical, at least 55% identical, at least 60% identical, at least 65% identical, at least 70% identical, at least 75% identical, at least 80% identical, at least 81% identical, at least 82% identical, at least 83% identical, at least 84% identical, at least 85% identical, at least 86% identical, at least 87% identical, at least 88% identical, at least 89% identical, at least 90% identical, at least 91% identical, at least 92% identical, at least 93% identical, at least 94% identical, at least 95% identical, at least 96% identical, at least 97% identical, at least 98% identical, at least 99% identical, at least 99.5% identical, at least 99.6% identical, at least 99.7% identical, at least 99.8% identical, at least 99.9% identical, or 100% identical to an amino acid sequence set forth in SEQ ID NOs: 2-15, 49-53, 2-15, 49-53, 621-622, 624-628, 631-640, 642-651, or 653-654.

[1084] In some embodiments, a combination or composition comprises an Insecticidal Agent (IA) (e.g., one or more of IAs: B1-B479 in Table B) and one or more Wild-Type U1-agatoxin-Ta1b peptides having an amino acid sequence that is at least 50% identical, at least 55% identical, at least 60% identical, at least 65% identical, at least 70% identical, at least 75% identical, at least 80% identical, at least 81% identical, at least 82% identical, at least 83% identical, at least 84% identical, at least 85% identical, at least 86% identical, at least 87% identical, at least 88% identical, at least 89% identical, at least 90% identical, at least 91% identical, at least 92% identical, at least 93% identical, at least 94% identical, at least 95% identical, at least 96% identical, at least 97% identical, at least 98% identical, at least 99% identical, at least 99.5% identical, at least 99.6% identical, at least 99.7% identical, at least 99.8% identical, at least 99.9% identical, or 100% identical to an amino acid sequence set forth in SEQ ID NO: 1.

[1085] Combinations: Scorpion Toxins and Insecticidal Agents (IAs)

[1086] In some embodiments, an Insecticidal Agent (IA) (e.g., one or more of IAs: B1-B479 in Table B) can be combined with one or more toxins isolated from a scorpion.

[1087] In some embodiments, a combination or composition comprises an Insecticidal Agent (IA) (e.g., one or more of IAs: B1-B479 in Table B) and one or more scorpion toxins selected from the following toxins: Imperatoxin-A (IpTxa), Potassium channel toxin alpha-KTx 10.2 (Cobatoxin-2), Potassium channel toxin alpha-KTx 11.1 (Parabutoxin-1), Potassium channel toxin alpha-KTx 11.2 (Parabutoxin-2), Potassium channel toxin alpha-KTx 11.3 (Parabutoxin-10), Potassium channel toxin alpha-KTx 12.1 (Butantoxin), Potassium channel toxin alpha-KTx 12.2 (Butantoxin), Potassium channel toxin alpha-KTx 12.3 (Butantoxin-like peptide), Potassium channel toxin alpha-KTx 15.1 (Peptide Aa1), Potassium channel toxin alpha-KTx 15.3 (Toxin AmmTX3), Potassium channel toxin alpha-KTx 15.6 (Discrepin), Potassium channel toxin alpha-KTx 16.1 (Tamulotoxin), Potassium channel toxin alpha-KTx 19.1 (Neurotoxin BmBKTx1), Potassium channel toxin alpha-KTx 1.3 (Iberiotoxin), Potassium channel toxin alpha-KTx 1.4 (Limbatotoxin), Potassium channel toxin alpha-KTx 1.7 (Lqh 15-1), Potassium channel toxin alpha-KTx 1.9 (Hongotoxin-2), Potassium channel toxin alpha-KTx 1.10 (Parabutoxin-3), Potassium channel toxin alpha-KTx 1.11 (Slotoxin), Potassium channel toxin alpha-KTx 1.13 (Charybdotoxin c), Potassium channel toxin alpha-KTx 2.1 (Noxiustoxin), Potassium channel toxin alpha-KTx 2.2 (Margatoxin), Potassium channel toxin alpha-KTx 2.3 (CllTx1), Potassium channel toxin alpha-KTx 2.4 (Noxiustoxin-2), Potassium channel toxin alpha-KTx 2.5 (Hongotoxin-1), Potassium channel toxin alpha-KTx 2.6 (Hongotoxin-3), Potassium channel toxin alpha-KTx 2.7 (CllTx2), Potassium channel toxin alpha-KTx 2.8 (Toxin Ce1), Potassium channel toxin alpha-KTx 2.9 (Toxin Ce2), Potassium channel toxin alpha-KTx 2.10 (Toxin Ce3), Potassium channel toxin alpha-KTx 2.11 (Toxin Ce4), Potassium channel toxin alpha-KTx 2.12 (Toxin Ce5), Potassium channel toxin alpha-KTx 3.1 (Kaliotoxin-1), Potassium channel toxin alpha-KTx 3.2 (Agitoxin-2), Potassium channel toxin alpha-KTx 3.3 (Agitoxin-3), Potassium channel toxin alpha-KTx 3.4 (Agitoxin-1), Potassium channel toxin alpha-KTx 3.7 (OsK-1), Potassium channel toxin alpha-KTx 3.8 (Charybdotoxin-like peptide Bs 6), Potassium channel toxin alpha-KTx 3.9 (Kaliotoxin-3), Potassium channel toxin alpha-KTx 4.1 (Tityustoxin K-alpha), Potassium channel toxin alpha-KTx 4.3 (Toxin TdK1), Potassium channel toxin alpha-KTx 4.4 (Toxin Tc30), Potassium channel toxin alpha-KTx 5.1 (Leiurotoxin-1), Potassium channel toxin alpha-KTx 5.2 (Leiurotoxin I-like toxin P05), Potassium channel toxin alpha-KTx 5.4 (Tamapin), Potassium channel toxin alpha-KTx 5.5 (Tamapin-2), Potassium channel toxin alpha-KTx 6.1 (Potassium channel-blocking toxin 1), Potassium channel toxin alpha-KTx 6.2 (Maurotoxin), Potassium channel toxin alpha-KTx 6.3 (Neurotoxin HsTX1), Potassium channel toxin alpha-KTx 6.12 (Anuroctoxin), Potassium channel toxin alpha-KTx 6.13 (Spinoxin), Potassium channel toxin alpha-KTx 6.14 (HgeTx1), Potassium channel toxin alpha-KTx 7.2 (Toxin PiTX-K-beta), Potassium channel toxin gamma-KTx 1.2 (Ergtoxin-like protein 1), Potassium channel toxin gamma-KTx 1.3 (Ergtoxin-like protein 1), Potassium channel toxin gamma-KTx 1.4 (Ergtoxin-like protein 1), Potassium channel toxin gamma-KTx 1.5 (Ergtoxin-like protein 1), Potassium channel toxin gamma-KTx 1.6 (Ergtoxin-like protein 1), Potassium channel toxin gamma-KTx 4.2 (Ergtoxin-like protein 5), Insectotoxin-I1. Small toxin (Peptide I), Insectotoxin-I3 (BeI3), Insectotoxin-I4 (BeI4), Insectotoxin-I5A, Neurotoxin 8 (Neurotoxin VIII), Probable toxin Lqh 8/6, Neurotoxin 9 (Neurotoxin IX), Maurocalcin (MCa), Chlorotoxin-like peptide Bs14 (Bs14), Chlorotoxin (CTX), Neurotoxin P2, Insectotoxin-I5 (BeI5), Potassium channel toxin alpha-KTx 6.15 (Hemitoxin), Toxin GaTx1, AahIT1, Phaiodotoxin, BaIT2, BotIT1, BotIT2, BmK M1, BmK-M2, BmK-M4, BmK-M7, BmK IT-AP, Bom3, Bom4, BjaIT, Bj-xtrIT, BjIT2, LqhaIT, Lqhb1, LqhIT2, LqhdprIT3a, Lgh-xtrIT, Lqh3, Lqh6, Lqh7, LqqIT1, LqqIT2, Lqq3, OD1, Ts1, Tz1, or combinations thereof.

[1088] In some embodiments, a combination or composition comprises an Insecticidal Agent (IA) (e.g., one or more of IAs: B1-B479 in Table B) and one or more scorpion toxins, wherein the scorpion toxin has an amino acid sequence as set forth in SEQ ID NOs: 88-191.

[1089] In some embodiments, a combination or composition comprises an Insecticidal Agent (IA) (e.g., one or more of IAs: B1-B479 in Table B) and one or more scorpion toxins, wherein the toxin can be an imperatoxin. Imperatoxins are peptide toxins derived from the venom of the African scorpion (Pandinus imperator).

[1090] In some embodiments, a combination or composition comprises an Insecticidal Agent (IA) (e.g., one or more of IAs: B1-B479 in Table B) and one or more imperatoxins.

[1091] In some embodiments, a combination or composition comprises an Insecticidal Agent (IA) (e.g., one or more of IAs: B1-B479 in Table B) and one or more imperatoxins, wherein the imperatoxin is Imperatoxin A (IpTx-a), or a variant thereof. In some embodiments, the IpTx-a has an amino acid sequence of

(SEQ ID NO: 66)
GDCLPHLKRCKADNDCCGKKCKRRGTNAEKRCR.

[1092] In some embodiments, the method of controlling an insect comprises: applying IpTx-a to an insect; and applying an Insecticidal Agent (IA) (e.g., one or more of IAs: B1-B479 in Table B) to said insect. The foregoing application can be applied concomitantly and/or sequentially, and either in the same or separate compositions. In some embodiments, IpTx-a and Insecticidal Agent (IA) (e.g., one or more of IAs: B1-B479 in Table B) may be applied to (IpTx-a)-resistant insects. In some embodiments, IpTx-a and

[1093] Insecticidal Agent (IA) (e.g., one or more of IAs: B1-B479 in Table B) may be applied to (Bt toxin)-resistant insects. The ratio of IpTx-a to IA, on a dry weight basis, can be selected from at least about the following ratios: 10,000:1, 5,000:1, 1,000:1, 500:1, 250:1, 200:1, 100:1, 99:1, 95:5, 90:10, 85:15, 80:20, 75:25, 70:30, 65:35, 60:40, 55:45, 1:1, 45:55, 40:60, 35:65, 30:70, 25:75, 20:80, 15:85, 10:90, 5:95, 1:99, 1:100, 1:200, 1:250, 1:500, 1:1,000, 1:5,000, or 1:10,000, or any combination of any two of these values. The total concentration of IpTx-a and Insecticidal Agent (IA) (e.g., one or more of IAs: B1-B479 in Table B) in the composition is selected from the following percent concentrations: 0, 1, 5, 10, 15, 20, 25, 30, 35, 40, 45, 50, 55, 60, 65, 70, 75, 80, 85, 90, 95, 99 or 100%, or any range between any two of these values, and the remaining percentage of the composition is comprised of excipients.

[1094] In some embodiments, the combination or composition comprises both an IpTx-a and an Insecticidal Agent (IA) (e.g., one or more of IAs: B1-B479 in Table B). The combination or composition can be in the ratio of IpTx-a to Insecticidal Agent (IA) (e.g., one or more of IAs: B1-B479 in Table B), on a dry weight basis, from about any or all of the following ratios: 10,000:1, 5,000:1, 1,000:1, 500:1, 250:1, 200:1, 100:1, 99:1, 95:5, 90:10, 85:15, 80:20, 75:25, 70:30, 65:35, 60:40, 55:45, 1:1, 45:55, 40:60, 35:65, 30:70, 25:75, 20:80, 15:85, 10:90, 5:95, 1:99, 1:100, 1:200, 1:250, 1:500, 1:1,000, 1:5,000, or 1:10,000, or any combination of any two of these values. In some embodiments, the combination or composition can have a ratio of IpTx-a to Insecticidal Agent (IA) (e.g., one or more of IAs: B1-B479 in Table B), on a on a dry weight basis, selected from about the following ratios: 0:50, 45:55, 40:60, 35:65, 30:70, 25:75, 20:80, 15:85, 10:90, 5:95, 1:99, 0.5:99.5, 0.1:99.9 and 0.01:99.99 or any combination of any two of these values.

[1095] In some embodiments, an Insecticidal Agent (IA) (e.g., one or more of IAs: B1-B479 in Table B) can be combined with one or more AaIT1 toxins. The protein toxin, AalT1, is a sodium channel site 4 toxin from North African desert scorpion (Androctonus australis). An exemplary AaIT1 toxin is a peptide having the amino acid sequence according to SEQ ID NO: 88 (NCBI accession No. P01497.2). AaIT1 is a site 4 toxin, which forces the insect sodium channel to open by lowering the activation reaction energy barrier.

[1096] In some embodiments, the method of controlling an insect comprises: applying AaIT1 to an insect; and applying an Insecticidal Agent (IA) (e.g., one or more of IAs: B1-B479 in Table B) to said insect. The foregoing application can be applied concomitantly and/or sequentially, and either in the same or separate compositions. In some embodiments, AaIT1 and the Insecticidal Agent (IA) (e.g., one or more of IAs: B1-B479 in Table B) may be applied to (AaIT1)-resistant insects. In some embodiments, AaIT1 and the Insecticidal Agent (IA) (e.g., one or more of IAs: B1-B479 in Table B) may be applied to (Bt toxin)-resistant insects. The ratio of AaIT1 to Insecticidal Agent (IA) (e.g., one or more of IAs: B1-B479 in Table B), on a dry weight basis, can be selected from at least about the following ratios: 10,000:1, 5,000:1, 1,000:1, 500:1, 250:1, 200:1, 100:1, 99:1, 95:5, 90:10, 85:15, 80:20, 75:25, 70:30, 65:35, 60:40, 55:45, 1:1, 45:55, 40:60, 35:65, 30:70, 25:75, 20:80, 15:85, 10:90, 5:95, 1:99, 1:100, 1:200, 1:250, 1:500, 1:1,000, 1:5,000, or 1:10,000, or any combination of any two of these values. The total concentration of AaIT1 and Insecticidal Agent (IA) (e.g., one or more of IAs: B1-B479 in Table B) in the composition is selected from the following percent concentrations: 0, 1, 5, 10, 15, 20, 25, 30, 35, 40, 45, 50, 55, 60, 65, 70, 75, 80, 85, 90, 95, 99 or 100%, or any range between any two of these values, and the remaining percentage of the composition is comprised of excipients.

[1097] In some embodiments, a combination or composition comprises an Insecticidal Agent (IA) (e.g., one or more of IAs: B1-B479 in Table B) and one or more scorpion peptides or scorpion toxins having an amino acid sequence that is at least 50% identical, at least 55% identical, at least 60% identical, at least 65% identical, at least 70% identical, at least 75% identical, at least 80% identical, at least 81% identical, at least 82% identical, at least 83% identical, at least 84% identical, at least 85% identical, at least 86% identical, at least 87% identical, at least 88% identical, at least 89% identical, at least 90% identical, at least 91% identical, at least 92% identical, at least 93% identical, at least 94% identical, at least 95% identical, at least 96% identical, at least 97% identical, at least 98% identical, at least 99% identical, at least 99.5% identical, at least 99.6% identical, at least 99.7% identical, at least 99.8% identical, at least 99.9% identical, or 100% identical to an amino acid sequence set forth in SEQ ID NOs: 66, 88-191.

[1098] Combinations: Conotoxins and Insecticidal Agents (IAs)

[1099] Conotoxins are toxins isolated from cone shells; these toxins act by interfering with neuronal communication. Examples of conotoxins include the α-, ω-, μ-, δ-, and κ-conotoxins. Briefly, the α-conotoxins (and αA- & φ-conotoxins) target nicotinic ligand gated channels; ω-conotoxins target voltage-gated calcium channels; μ-conotoxins target the voltage-gated sodium channels; δ-conotoxins target the voltage-gated sodium channel; and κ-conotoxins target the voltage-gated potassium channel.

[1100] In some embodiments, an Insecticidal Agent (IA) (e.g., one or more of IAs: B1-B479 in Table B), can be combined with one or more peptides isolated from organisms belonging to the Conus genus.

[1101] In some embodiments, an Insecticidal Agent (IA) (e.g., one or more of IAs: B1-B479 in Table B) can be combined with one or more peptides isolated from organisms belonging to the Conus genus, wherein the peptide isolated is a conotoxin.

[1102] In some embodiments, an Insecticidal Agent (IA) (e.g., one or more of IAs: B1-B479 in Table B) can be combined with one or more peptides isolated from Conus amadis; Conus catus; Conus ermineus; Conus geographus; Conus gloriamaris; Conus kinoshitai; Conus magus; Conus marmoreus; Conus purpurascens; Conus stercusmuscarum; Conus striatus; Conus textile; or Conus tulipa.

[1103] In some embodiments, an Insecticidal Agent (IA) (e.g., one or more of IAs: B1-B479 in Table B) can be combined with one or more α-conotoxin, αA-conotoxin, φ-conotoxins, ω-conotoxin, μ-conotoxin, δ-conotoxin, or κ-conotoxin.

[1104] In some embodiments, the method of controlling an insect comprises: applying a conotoxin to an insect; and applying an Insecticidal Agent (IA) (e.g., one or more of IAs: B1-B479 in Table B) to said insect. The foregoing application can be applied concomitantly and/or sequentially, and either in the same or separate compositions. In some embodiments, conotoxin and Insecticidal Agent (IA) (e.g., one or more of IAs: B1-B479 in Table B) may be applied to (conotoxin)-resistant insects. In some embodiments, conotoxin and Insecticidal Agent (IA) (e.g., one or more of IAs: B1-B479 in Table B) may be applied to (Bt toxin)-resistant insects. The ratio of conotoxin to Insecticidal Agent (IA) (e.g., one or more of IAs: B1-B479 in Table B), on a dry weight basis, can be selected from at least about the following ratios: 10,000:1, 5,000:1, 1,000:1, 500:1, 250:1, 200:1, 100:1, 99:1, 95:5, 90:10, 85:15, 80:20, 75:25, 70:30, 65:35, 60:40, 55:45, 1:1, 45:55, 40:60, 35:65, 30:70, 25:75, 20:80, 15:85, 10:90, 5:95, 1:99, 1:100, 1:200, 1:250, 1:500, 1:1,000, 1:5,000, or 1:10,000, or any combination of any two of these values. The total concentration of conotoxin and Insecticidal Agent (IA) (e.g., one or more of IAs: B1-B479 in Table B) in the composition is selected from the following percent concentrations: 0, 1, 5, 10, 15, 20, 25, 30, 35, 40, 45, 50, 55, 60, 65, 70, 75, 80, 85, 90, 95, 99 or 100%, or any range between any two of these values, and the remaining percentage of the composition is comprised of excipients.

[1105] In some embodiments, the combination or composition comprises both a conotoxin and an Insecticidal Agent (IA) (e.g., one or more of IAs: B1-B479 in Table B). The combination or composition can be in the ratio of conotoxin to Insecticidal Agent (IA) (e.g., one or more of IAs: B1-B479 in Table B), on a dry weight basis, from about any or all of the following ratios: 10,000:1, 5,000:1, 1,000:1, 500:1, 250:1, 200:1, 100:1, 99:1, 95:5, 90:10, 85:15, 80:20, 75:25, 70:30, 65:35, 60:40, 55:45, 1:1, 45:55, 40:60, 35:65, 30:70, 25:75, 20:80, 15:85, 10:90, 5:95, 1:99, 1:100, 1:200, 1:250, 1:500, 1:1,000, 1:5,000, or 1:10,000, or any combination of any two of these values. In some embodiments, the combination or composition can have a ratio of conotoxin to Insecticidal Agent (IA) (e.g., one or more of IAs: B1-B479 in Table B), on a on a dry weight basis, selected from about the following ratios: 0:50, 45:55, 40:60, 35:65, 30:70, 25:75, 20:80, 15:85, 10:90, 5:95, 1:99, 0.5:99.5, 0.1:99.9 and 0.01:99.99 or any combination of any two of these values.

[1106] Combinations: Fungi/Fungal Toxins and CRIPs

[1107] In some embodiments, a combination or composition of the present invention comprises one or more CRIPs (e.g. one or more of CRIPs: A1-A68 in Table A) and one or more Insecticidal Agents (IAs), wherein the IA is

[1108] In some embodiments, a combination or composition of the present invention comprises one or more CRIPs (e.g. one or more of CRIPs: A1-A68 in Table A) and one or more Insecticidal Agents (IAs), wherein the IA is

[1109] In some embodiments, a combination or composition of the present invention comprises one or more CRIPs (e.g. one or more of CRIPs: A1-A68 in Table A) and one or more Insecticidal Agents (IAs), wherein the IA is an entomopathogenic fungi.

[1110] In some embodiments, a combination or composition of the present invention comprises one or more CRIPs (e.g. one or more of CRIPs: A1-A68 in Table A) and one or more Insecticidal Agents (IAs), wherein the IA is a peptide, protein, or toxin produced from an entomopathogenic fungi.

[1111] In some embodiments, a combination or composition of the present invention comprises one or more CRIPs (e.g. one or more of CRIPs: A1-A68 in Table A) and one or more Insecticidal Agents (IAs), wherein the IA is an Ascomycete fungal toxin.

[1112] In some embodiments, a combination or composition of the present invention comprises one or more CRIPs (e.g. one or more of CRIPs: A1-A68 in Table A) and one or more Insecticidal Agents (IAs), wherein the IA is a Cordycipitaceae family fungal toxin.

[1113] In some embodiments, a combination or composition of the present invention comprises one or more CRIPs (e.g. one or more of CRIPs: A1-A68 in Table A) and one or more Insecticidal Agents (IAs), wherein the IA is a Akanthomyces toxin; a Ascopolyporus toxin; a Beauveria toxin; a Beejasamuha toxin; a Cordyceps toxin; a Coremiopsis toxin; a Engyodontium toxin; a Gibellula toxin; a Hyperdermium toxin; a Insecticola toxin; a Isaria toxin; a Lecanicillium toxin; a Microhilum toxin; a Phytocordyceps toxin; a Pseudogibellula toxin; a Rotiferophthora toxin; a Simplicillium toxin; or a Torrubiella toxin.

[1114] In some embodiments, a combination or composition of the present invention comprises one or more CRIPs (e.g. one or more of CRIPs: A1-A68 in Table A) and one or more Insecticidal Agents (IAs), wherein the IA is a fungi organism or toxin therefrom, selected from the following genera: Beauveria; Metarhizium; Paecilomyces; Lecanicillium; Nomuraea; Isaria; Hirsutella; Sorosporella; Aspergillus; Cordiceps; Entomophthora; Zoophthora; Pandora; Entomophaga; Conidiobolus and Basidiobolus.

[1115] In some embodiments, a combination or composition of the present invention comprises one or more CRIPs (e.g. one or more of CRIPs: A1-A68 in Table A) and one or more Insecticidal Agents (IAs), wherein the IA is a Beauveria toxin.

[1116] In some embodiments, a combination or composition of the present invention comprises one or more CRIPs (e.g. one or more of CRIPs: A1-A68 in Table A) and one or more Insecticidal Agents (IAs), wherein the IA is one of the following toxins: a Beauveria alba toxin; a Beauveria amorpha toxin; a Beauveria arenaria toxin; a Beauveria asiatica toxin; a Beauveria australis toxin; a Beauveria bassiana toxin; a Cordyceps bassiana toxin; a Beauveria brongniartii toxin; a Beauveria brumptii toxin; a Beauveria caledonica toxin; a Beauveria chiromensis toxin; a Beauveria coccorum toxin; a Beauveria cretacea toxin; a Beauveria cylindrospora toxin; a Beauveria delacroixii toxin; a Beauveria densa toxin; a Beauveria dependens toxin; a Beauveria doryphorae toxin; a Beauveria effusa toxin; a Beauveria epigaea toxin; a Beauveria felina toxin; a Beauveria geodes toxin; a Beauveria globulifera toxin; a Beauveria heimii toxin; a Beauveria hoplocheli toxin; a Beauveria kipukae toxin; a Beauveria laxa toxin; a Beauveria malawiensis toxin; a Beauveria medogensis toxin; a Beauveria melolonthae toxin; a Beauveria nubicola toxin; a Beauveria oryzae toxin; a Beauveria paradoxa toxin; a Beauveria paranensis toxin; a Beauveria parasitica toxin; a Beauveria petelotii toxin; a Beauveria pseudobassiana toxin; a Beauveria rileyi toxin; a Beauveria rubra toxin; a Beauveria shiotae toxin; a Beauveria sobolifera toxin; a Beauveria spicata toxin; a Beauveria stephanoderis toxin; a Beauveria sulfurescens toxin; a Beauveria sungii toxin; a Beauveria tenella toxin; a Beauveria tundrensis toxin; a Beauveria velata toxin; a Beauveria varroae toxin; a Beauveria vermiconia toxin; a Beauveria vexans toxin; a Beauveria viannai toxin; or a Beauveria virella toxin.

[1117] In some embodiments, a combination or composition of the present invention comprises one or more CRIPs (e.g. one or more of CRIPs: A1-A68 in Table A) and one or more Insecticidal Agents (IAs), wherein the IA is a Beauveria bassiana toxin

[1118] In some embodiments, a combination or composition of the present invention comprises one or more CRIPs (e.g. one or more of CRIPs: A1-A68 in Table A) and one or more Insecticidal Agents (IAs), wherein the IA is a beauvericin.

[1119] In some embodiments, a combination or composition of the present invention comprises one or more CRIPs (e.g. one or more of CRIPs: A1-A68 in Table A) and one or more Insecticidal Agents (IAs), wherein the IA is a beauvericin having the chemical formula C₄₅H₅₇N₃ 09.

[1120] In some embodiments, a combination or composition of the present invention comprises one or more CRIPs (e.g. one or more of CRIPs: A1-A68 in Table A) and one or more Insecticidal Agents (IAs), wherein the IA is a “Beauvericin A” toxin having the chemical formula C₄₆H₅₉N₃O₉.

[1121] In some embodiments, a combination or composition of the present invention comprises one or more CRIPs (e.g. one or more of CRIPs: A1-A68 in Table A) and one or more Insecticidal Agents (IAs), wherein the IA is a “Beauvericin B” toxin having the chemical formula C₄₇H₆₁N₃O₉.

[1122] In some embodiments, a combination or composition of the present invention comprises one or more CRIPs (e.g. one or more of CRIPs: A1-A68 in Table A) and one or more Insecticidal Agents (IAs), wherein the IA is a Beauveria bassiana strain ANT-03 spore.

[1123] In some embodiments, a combination or composition of the present invention comprises one or more CRIPs (e.g. one or more of CRIPs: A1-A68 in Table A) and one or more Insecticidal Agents (IAs), wherein the IA is an Ascomycete fungal toxin.

[1124] In some embodiments, a combination or composition of the present invention comprises one or more Insecticidal Agents (IAs), and one or more CRIPs (e.g. one or more of CRIPs: A1-A68 in Table A), wherein the IA is a Cordycipitaceae family fungal toxin.

[1125] In some embodiments, a combination or composition of the present invention comprises one or more Insecticidal Agents (IAs), and one or more CRIPs (e.g. one or more of CRIPs: A1-A68 in Table A), wherein the IA is an Akanthomyces toxin; a Ascopolyporus toxin; a Beauveria toxin; a Beejasamuha toxin; a Cordyceps toxin; a Coremiopsis toxin; a Engyodontium toxin; a Gibellula toxin; a Hyperdermium toxin; a Insecticola toxin; a Isaria toxin; a Lecanicillium toxin; a Microhilum toxin; a Phytocordyceps toxin; a Pseudogibellula toxin; a Rotiferophthora toxin; a Simplicillium toxin; or a Torrubiella toxin.

[1126] In some embodiments, a combination or composition of the present invention comprises one or more Insecticidal Agents (IAs), and one or more CRIPs (e.g. one or more of CRIPs: A1-A68 in Table A), wherein the IA is a Beauveria toxin.

[1127] Combinations: Lectins and CRIPs

[1128] In some embodiments, a combination of the present invention can comprise one or more IAs, and one or more CRIPs, wherein the IA is not fused nor operably linked to the CRIP, and wherein the IA is Galanthus nivalis agglutinin (GNA).

[1129] In some embodiments, a combination or composition of the present invention comprises one or more Insecticidal Agents (IAs), and one or more CRIPs (e.g. one or more of CRIPs: A1-A68 in Table A), wherein the IA is a lectin.

[1130] In some embodiments, a combination or composition of the present invention comprises one or more Insecticidal Agents (IAs), and one or more CRIPs (e.g. one or more of CRIPs: A1-A68 in Table A), wherein the IA is a lectin, wherein said lectin is not fused nor operably linked to the CRIP.

[1131] In some embodiments, a combination or composition of the present invention comprises one or more Insecticidal Agents (IAs), and one or more CRIPs (e.g. one or more of CRIPs: A1-A68 in Table A), wherein the IA is can be one of the following lectins: Galanthus nivalis agglutinin (GNA); Sambucus nigra lectin (SNA); Maackia amurensis-II (MAL-II); Erythrina cristagalli lectin (ECL); Ricinus communis agglutinin-I (RCA); peanut agglutinin (PNA); wheat germ agglutinin (WGA); Griffonia simphcifolia-II (GSL-II); Con A; Lens culinaris agglutinin (LCA); Mannose-binding lectin (MBL); BanLec; galectins; Phaseolus vulgaris Leucoagglutinin (PHA-L); Phaseolus vulgaris Erythroagglutinin (PHA-E); and/or Datura stramonium Lectin (DSL).

[1132] In some embodiments, a combination or composition of the present invention comprises one or more Insecticidal Agents (IAs), and one or more CRIPs (e.g. one or more of CRIPs: A1-A68 in Table A), wherein the IA is a lectin having an amino acid sequence selected from SEQ ID NOs: 35, 595-615, or a variant thereof.

[1133] In some embodiments, a combination or composition of the present invention comprises one or more Insecticidal Agents (IAs), and one or more CRIPs (e.g. one or more of CRIPs: A1-A68 in Table A), wherein the IA is one of the following lectins: Galanthus nivalis agglutinin (GNA) (SEQ ID NO: 35); Sambucus nigra (European elder) lectin (SNA) (SEQ ID NO: 596); Leukoagglutinating lectin from the seeds of Maackia amurensis (MAL) (SEQ ID NO: 597); Erythrina cristagalli lectin (ECL) (SEQ ID NO: 598); Ricinus communis agglutinin-I (RCA) (SEQ ID NO: 599); Peanut agglutinin (PNA) (SEQ ID NO: 600); Agglutinin isolectin 1 (WGA1) (SEQ ID NO: 601); Concanavalin-A (CNA) precursor (SEQ ID NO: 602); Jacalin-like lectin (Chain A) (SEQ ID NO: 603); Lectin alpha-1 chain (SEQ ID NO: 604); Lectin CaBo (SEQ ID NO: 605); Lectin ConGF (SEQ ID NO: 606); Mannose-specific lectin alpha chain (SEQ ID NO: 607); Beta-galactoside-specific lectin 1 (SEQ ID NO: 608); Galectin-3 (SEQ ID NO: 609); Mannose/glucose-specific lectin Cramoll (SEQ ID NO: 610); Beta-galactoside-specific lectin 3 (SEQ ID NO: 611); Lactose-binding lectin-2 (SEQ ID NO: 612); Galectin-1 (SEQ ID NO: 613); Alpha-N-acetylgalactosamine-specific lectin (SEQ ID NO: 614); Favin (SEQ ID NO: 615); or a combination thereof.

[1134] In some embodiments, a combination or composition of the present invention comprises one or more Insecticidal Agents (IAs), and one or more CRIPs (e.g. one or more of CRIPs: A1-A68 in Table A), wherein the IA may comprise an amino acid sequence having at least 50%, at least 55%, at least 60%, at least 65%, at least 70%, at least 75%, at least 80%, at least 81%, at least 82%, at least 83%, at least 84%, at least 85%, at least 86%, at least 87%, at least 88%, at least 89%, at least 90%, at least 91%, at least 92%, at least 93%, at least 94%, at least 95%, at least 96%, at least 97%, at least 98%, at least 99%, at least 99.5%, at least 99.6%, at least 99.7%, at least 99.8%, at least 99.9%, or 100% amino acid sequence identity to an amino acid sequence as set forth in any one of SEQ ID NOs: 35, 595-615.

[1135] Combinations: Chitinases and CRIPs

[1136] In some embodiments, a combination or composition of the present invention comprises one or more Insecticidal Agents (IAs), and one or more CRIPs (e.g. one or more of CRIPs: A1-A68 in Table A), wherein the IA is a chitinase.

[1137] In some embodiments, a combination or composition of the present invention comprises one or more Insecticidal Agents (IAs), and one or more CRIPs (e.g. one or more of CRIPs: A1-A68 in Table A), wherein the IA is a chitinase from Trichoderma viride.

[1138] In some embodiments, a combination or composition of the present invention comprises one or more Insecticidal Agents (IAs), and one or more CRIPs (e.g. one or more of CRIPs: A1-A68 in Table A), wherein the IA is a chitinase having an amino acid sequence as set forth in SEQ ID NO: 620.

[1139] In some embodiments, a combination or composition of the present invention comprises one or more Insecticidal Agents (IAs), and one or more CRIPs (e.g. one or more of CRIPs: A1-A68 in Table A), wherein the IA may be a chitinase comprising an amino acid sequence having at least 50%, at least 55%, at least 60%, at least 65%, at least 70%, at least 75%, at least 80%, at least 81%, at least 82%, at least 83%, at least 84%, at least 85%, at least 86%, at least 87%, at least 88%, at least 89%, at least 90%, at least 91%, at least 92%, at least 93%, at least 94%, at least 95%, at least 96%, at least 97%, at least 98%, at least 99%, at least 99.5%, at least 99.6%, at least 99.7%, at least 99.8%, at least 99.9%, or 100% amino acid sequence identity to an amino acid sequence as set forth in any one of SEQ ID NO: 620.

[1140] Combinations: Azadirachta indica Compounds and CRIPs

[1141] In some embodiments, a combination or composition of the present invention comprises one or more Insecticidal Agents (IAs), and one or more CRIPs (e.g. one or more of CRIPs: A1-A68 in Table A), wherein the IA is an Azadirachta indica compound.

[1142] In some embodiments, a combination or composition of the present invention comprises one or more Insecticidal Agents (IAs), and one or more CRIPs (e.g. one or more of CRIPs: A1-A68 in Table A), wherein the IA is an Azadirachtin; an Azadiradione; an Azadiradionolide; a Deacetylgedunin; a Deacetylazadirachtinol; a Desfuranoazadiradione; a Epoxyazadiradione; a Gedunin; a Mahmoodin; a Neemfruitin A; a Neemfruitin B; a Nimbolide; a Nimbin; a Nimolicinol; an Ohchinin Acetate; a Salannin; a Salannol; an alpha-Nimolactone; a beta-Nimolactone; a 2′,3′-Dihydrosalannin; a 3-Deacetylsalannin; a 6-Deacetylnimbin; a 7-Acetyl-16,17-dehydro-16-hydroxyneotrichilenone; a 7-Benzoylnimbocinol; a 7-Deacetyl-7-benzoylepoxyazadiradione; a 7-Deacetyl-7-benzoylgedunin; a 7-Deacetyl-17-epinimolicinol; a 15-Hydroxyazadiradione; a 17-Epi-17-Hydroxyazadiradione; a 17-Epiazadiradione; a 20,21,22,23-Tetrahydro-23-oxoazadirone; a 22,23-Dihydronimocinol; or a 28-Deoxonimbolide.

[1143] In some embodiments, a combination or composition of the present invention comprises one or more Insecticidal Agents (IAs), and one or more CRIPs (e.g. one or more of CRIPs: A1-A68 in Table A), wherein the IA is Azadirachtin.

[1144] In some embodiments, a combination or composition of the present invention comprises one or more Insecticidal Agents (IAs), and one or more CRIPs (e.g. one or more of CRIPs: A1-A68 in Table A), wherein the IA is an Azadirachtin having a chemical formula: C₃₅H₄₄O₁₆.

[1145] Combinations: Boron Compounds and CRIPs

[1146] In some embodiments, a combination or composition of the present invention comprises one or more Insecticidal Agents (IAs), and one or more CRIPs (e.g. one or more of CRIPs: A1-A68 in Table A), wherein the IA is a boron compound.

[1147] In some embodiments, a combination or composition of the present invention comprises one or more Insecticidal Agents (IAs), and one or more CRIPs (e.g. one or more of CRIPs: A1-A68 in Table A), wherein the IA is a boric acid, diboron tetrahydroxide, a borate, a boron oxide, a borane, or a combination thereof.

[1148] In some embodiments, a combination or composition of the present invention comprises one or more Insecticidal Agents (IAs), and one or more CRIPs (e.g. one or more of CRIPs: A1-A68 in Table A), wherein the IA is a borane and/or a borate ester that produces oxides of boron in aqueous media.

[1149] In some embodiments, a combination or composition of the present invention comprises one or more Insecticidal Agents (IAs), and one or more CRIPs (e.g. one or more of CRIPs: A1-A68 in Table A), wherein the IA is boric acid, a borate (e.g., basic sodium borate (borax)), or a combination of boric acid and a borate.

[1150] In some embodiments, a combination or composition of the present invention comprises one or more Insecticidal Agents (IAs), and one or more CRIPs (e.g. one or more of CRIPs: A1-A68 in Table A), wherein the IA is a borate.

[1151] In some embodiments, a combination or composition of the present invention comprises one or more Insecticidal Agents (IAs), and one or more CRIPs (e.g. one or more of CRIPs: A1-A68 in Table A), wherein the IA is one of the following: perborates, metaborates, tetraborates, octaborates, borate esters, metallic borates (e.g., sodium borate, zinc borate and potassium borate), di sodium tetraborate decahydrate, disodium octaborate tetrahydrate, sodium metaborate, sodium perborate monohydrate, disodium octaborate, sodium tetraborate pentahydrate, sodium tetraborate, copper metaborate, zinc borate, barium metaborate, or any combination thereof.

[1152] In some embodiments, a combination or composition of the present invention comprises one or more Insecticidal Agents (IAs), and one or more CRIPs (e.g. one or more of CRIPs: A1-A68 in Table A), wherein the IA is borax (e.g., sodium borate decahydrate-10 mol Na₂B₄O₇·10H₂O or sodium borate pentahydrate-5 mol Na₂B₄O₇·5H₂O).

[1153] In some embodiments, a combination or composition of the present invention comprises one or more Insecticidal Agents (IAs), and one or more CRIPs (e.g. one or more of CRIPs: A1-A68 in Table A), wherein the IA is a boron compound that may be utilized in effective amounts as substitutes for borax (or may be utilized in effective amounts in combination with borax or one another).

[1154] In some embodiments, a combination or composition of the present invention comprises one or more Insecticidal Agents (IAs), and one or more CRIPs (e.g. one or more of CRIPs: A1-A68 in Table A), wherein the IA is anhydrous borax (Na₂B₄O₇); ammonium tetraborate ((NH₄)₂B₄O₇·4H₂O); ammonium pentaborate ((NH₄)₂B₁₀O₁₆·8H₂O); potassium pentaborate (K2B₁₀O₁₆·8H₂O); potassium tetraborate (K2B₄O₇·4H₂O); sodium metaborate ((8 mol) Na₂B₂O₄·8H₂O); sodium metaborate ((4 mol) Na₂B₂O₄·4H₂O); disodium tetraborate decahydrate (Na₂B₄O₇·10H₂O); disodium tetraborate pentahydrate (Na₂B₄O₇·5H₂O); disodium octaborate tetrahydrate (Na₂B₈O₁₃·4H₂O); or combinations thereof.

[1155] In some embodiments, a combination or composition of the present invention comprises one or more Insecticidal Agents (IAs), and one or more CRIPs (e.g. one or more of CRIPs: A1-A68 in Table A), wherein the IA is a boron compound that is selected from the group consisting of: borax, boric acid, disodium octaborate, sodium borate, sodium metaborate, sodium tetraborate decahydrate, boron oxide, boron carbide, boron nitride, boron tribromide, boron trichloride, and boron trifluoride.

[1156] In some embodiments, a combination or composition of the present invention comprises one or more Insecticidal Agents (IAs), and one or more CRIPs (e.g. one or more of CRIPs: A1-A68 in Table A), wherein the IA is boric acid.

[1157] In some embodiments, a combination or composition of the present invention comprises one or more Insecticidal Agents (IAs), and one or more CRIPs (e.g. one or more of CRIPs: A1-A68 in Table A), wherein the IA is boric acid having a chemical formula of H₃BO₃.

[1158] Combinations: Viruses and CRIPs

[1159] In some embodiments, a combination or composition of the present invention comprises one or more Insecticidal Agents (IAs), and one or more CRIPs (e.g. one or more of CRIPs: A1-A68 in Table A), wherein the IA is an Ascoviridae family virus.

[1160] In some embodiments, a combination or composition of the present invention comprises one or more Insecticidal Agents (IAs), and one or more CRIPs (e.g. one or more of CRIPs: A1-A68 in Table A), wherein the IA is an ascovirus such as Heliothis virescens ascovirus 3a; Heliothis virescens ascovirus 3; Heliothis virescens ascovirus 3b; Heliothis virescens ascovirus 3c; Heliothis virescens ascovirus 3d; Heliothis virescens ascovirus 3e; Heliothis virescens ascovirus 3f; Heliothis virescens ascovirus 3g; Heliothis virescens ascovirus 3h; Heliothis virescens ascovirus 3j; Spodoptera frugiperda ascovirus 1a; Trichoplusia ni ascovirus 2a; Heliothis virescens ascovirus 3i; Spodoptera ascovirus; Spodoptera exigua ascovirus 5a; Spodoptera frugiperda ascovirus 1c; Spodoptera frugiperda ascovirus I d; Trichoplusia ni ascovirus 2b; Trichoplusia ni ascovirus 2c; Trichoplusia ni ascovirus 2d; or Trichoplusia ni ascovirus 6b.

[1161] In some embodiments, an IA can be a virus from the Ascoviridae family. For example, in some embodiments, an IA can be a toursvirus such as Diadromus pulchellus toursvirus; Diadromus pulchellus ascovirus 4a; or Dasineura jujubifolia toursvirus 2a.

[1162] In some embodiments, a combination or composition of the present invention comprises one or more Insecticidal Agents (IAs), and one or more CRIPs (e.g. one or more of CRIPs: A1-A68 in Table A), wherein the IA is a virus from the Densovirinae family.

[1163] In some embodiments, a combination or composition of the present invention comprises one or more Insecticidal Agents (IAs), and one or more CRIPs (e.g. one or more of CRIPs: A1-A68 in Table A), wherein the IA is an Ambidensovirus.

[1164] In some embodiments, a combination or composition of the present invention comprises one or more Insecticidal Agents (IAs), and one or more CRIPs (e.g. one or more of CRIPs: A1-A68 in Table A), wherein the IA is an Ambidensovirus selected from the following group: Asteroid ambidensovirus 1; Sea star-associated densovirus; Blattodean ambidensovirus 1; Periplaneta fuliginosa densovirus; Periplaneta fuliginosa densovirus Guo/2000; Blattodean ambidensovirus 2; Blattella germanica densovirus 1; Decapod ambidensovirus 1; Cherax quadricarinatus densovirus; Dipteran ambidensovirus 1; Culex pipiens densovirus; Hemipteran ambidensovirus 1; Planococcus citri densovirus; Hemipteran ambidensovirus 2; Dysaphis plantaginea densovirus; Hemipteran ambidensovirus 3; Myzus persicae densovirus; Myzus persicae nicotianae densovirus; Hymenopteran ambidensovirus 1; Solenopsis invicta densovirus; Lepidopteran ambidensovirus 1; Galleria mellonella densovirus; Junonia coenia densovirus; Junonia coenia densovirus pBRJ/1990; Mythimna loreyi densovirus; Pseudoplusia includens densovirus; Orthopteran ambidensovirus 1; Acheta domestica densovirus; unclassified Ambidensovirus; Tetranychus urticae-associated ambidensovirus; unclassified Densovirus; Ambidensovirus CaaDV1; Ambidensovirus CaaDV2; Atrato Denso-like virus; Atrato Denso-like virus 1; Densovirus SC1065; Densovirus SC1118; Densovirus SC116; Densovirus SC2121; Densovirus SC2209; Densovirus SC2228; Densovirus SC2886; Densovirus SC3749; Densovirus SC3908; Densovirus SC4092; Densovirus SC444; Densovirus SC525; Diaphorina citri densovirus; Diatraea saccharalis densovirus; Lupine feces-associated densovirus; and Lupine feces-associated densovirus 2.

[1165] In some embodiments, a combination or composition of the present invention comprises one or more Insecticidal Agents (IAs), and one or more CRIPs (e.g. one or more of CRIPs: A1-A68 in Table A), wherein the IA is a virus from the Entomopoxvirinae family.

[1166] In some embodiments, a combination or composition of the present invention comprises one or more Insecticidal Agents (IAs), and one or more CRIPs (e.g. one or more of CRIPs: A1-A68 in Table A), wherein the IA is an Alphaentomopoxvirus; Betaentomopoxvirus; Diachasmimorpha entomopoxvirus; Melanoplus sanguinipes entomopoxvirus; or some heretofore unclassified Entomopoxvirinae.

[1167] In some embodiments, a combination or composition of the present invention comprises one or more Insecticidal Agents (IAs), and one or more CRIPs (e.g. one or more of CRIPs: A1-A68 in Table A), wherein the IA is an Entomopoxvirinae family virus selected from the following group: Anomala cuprea entomopoxvirus; Adoxophyes honmai entomopoxvirus; Adoxophyes honmai entomopoxvirus ‘L’; Amsacta moorei entomopoxvirus; Choristoneura biennis entomopoxvirus; Choristoneura fumiferana entomopoxvirus; Choristoneura rosaceana entomopoxvirus; Choristoneura rosaceana entomopoxvirus ‘L’; Heliothis armigera entomopoxvirus; Mythimna separata entomopoxvirus; Mythimna separata entomopoxvirus ‘L’; unclassified Betaentomopoxvirus; Diachasmimorpha longicaudata entomopoxvirus; Melanoplus sanguinipes entomopoxvirus ‘0’; Anacridium aegyptium entomopoxvirus; Calliptamus italicus entomopoxvirus; Chironomus decorus entomopoxvirus; Gomphocerus sibiricus entomopoxvirus; Homona coffearia entomopoxvirus; Linepithema humile entomopoxvirus 1; Oedaleus asiaticus entomopoxvirus; and Pseudaletia separata entomopoxvirus.

[1168] In some embodiments, a combination or composition of the present invention comprises one or more Insecticidal Agents (IAs), and one or more CRIPs (e.g. one or more of CRIPs: A1-A68 in Table A), wherein the IA is an Iridoviridae family virus, e.g., an Iridovirus.

[1169] In some embodiments, a combination or composition of the present invention comprises one or more Insecticidal Agents (IAs), and one or more CRIPs (e.g. one or more of CRIPs: A1-A68 in Table A), wherein the IA is an Iridoviridae family virus selected from the following group: Tipula iridescent virus; Invertebrate iridescent virus 31; Armadillidium vulgare iridescent virus; Popillia japonica iridescent virus; Porcellio scaber iridescent virus; Invertebrate iridescent virus 6; Gryllus bimaculatus iridovirus; unclassified Iridovirus; Acetes erythraeus iridovirus; Anticarsia gemmatalis iridescent virus; Armadillidium decorum iridescent virus; Barramundi perch iridovirus; Bluegill sunfish iridovirus; Common ponyfish iridovirus; Crimson snapper iridovirus; Decapterus macrosoma iridovirus; Gazza minuta iridovirus; Invertebrate iridescent virus 16; Costelytra zealandica iridescent virus; Invertebrate iridescent virus 2; Sericesthis iridescent virus; Invertebrate iridescent virus 23; Heteronychus arator iridescent virus; Invertebrate iridescent virus 24; Apis cerana iridescent virus; Invertebrate iridescent virus 29; Tenebrio molitor iridescent virus; Iridovirus barramundi/Quang Ninh/VNM/2008; Iridovirus IV31; Japanese sea bass iridovirus; Lagocephalus sceleratus iridovirus; Lates calcarifer iridovirus; Leiognathus splendens iridovirus; Marble goby iridovirus; Orbiculate batfish iridovirus; Parapristipoma trilineatum iridovirus; Perch iridovirus 603-2/China; Polydactylus sextarius iridovirus; Porcellio siculoccidentalis iridescent virus; Pyrrhalta luteola iridescent virus; Rana temporaria United Kingdom iridovirus 1; Rana temporaria United Kingdom iridovirus 2; Silver sea bream iridovirus; Snakehead iridovirus; Stone flounder iridovirus 603-3/China; Stone flounder iridovirus 724/China; Sturgeon iridovirus; Synodus indicus iridovirus; and Trichoniscus panormidensis iridescent virus.

[1170] In some embodiments, a combination or composition of the present invention comprises one or more Insecticidal Agents (IAs), and one or more CRIPs (e.g. one or more of CRIPs: A1-A68 in Table A), wherein the IA is an Nudiviridae family virus, e.g., an Alphanudivirus, a Betanudivirus, or some heretofore unclassified Nudiviridae family virus.

[1171] In some embodiments, a combination or composition of the present invention comprises one or more Insecticidal Agents (IAs), and one or more CRIPs (e.g. one or more of CRIPs: A1-A68 in Table A), wherein the IA is an Nudiviridae family virus selected from the following group: Gryllus bimaculatus nudivirus; Oryctes rhinoceros nudivirus; Heliothis zea nudivirus; Helicoverpa zea nudivirus 2; Allomyrina virus; Drosophila innubila nudivirus; Drosophila nudivirus RLU-2011; Esparto virus; Homarus gammarus nudivirus; Kallithea virus; Macrobrachium nudivirus CN-SL2011; Mauternbach virus; Nilaparvata lugens endogenous nudivirus; Penaeus monodon nudivirus; Tipula oleracea nudivirus; and Tomelloso virus.

[1172] In some embodiments, a combination or composition of the present invention comprises one or more Insecticidal Agents (IAs), and one or more CRIPs (e.g. one or more of CRIPs: A1-A68 in Table A), wherein the IA is an Iflaviridae family virus selected from the following group: Antheraea pernyi iflavirus; Brevicoryne brassicae virus; Brevicoryne brassicae virus—UK; Deformed wing virus; Kakugo virus; VDV-1/DWV recombinant; Dinocampus coccinellae paralysis virus; Ectropis obliqua virus; Ectropis obliqua picorna-like virus; Infectious flacherie virus; Infectious flacherie virus isolate silkworm; Ixodes holocyclus iflavirus; Lygus lineolaris virus 1; Lymantria dispar iflavirus 1; Nilaparvata lugens honeydew virus 1; Perina nuda virus; Sacbrood virus; Sacbrood virus CSBV-LN/China/2009; Slow bee paralysis virus; Spodoptera exigua iflavirus 1; Spodoptera exigua iflavirus 2; Varroa destructor virus 1; unclassified Iflavirus; ACT flea iflavirus; Aedes vexans iflavirus; Armigeres iflavirus; Bat iflavirus; Bee iflavirus 1; Blackberry iflavirus A; Blackberry iflavirus B; Bombyx mori iflavirus; Breves iflavirus; Diamondback moth iflavirus; Formica exsecta virus 2; Haemaphysalis flava iflavirus; Heliconius erato iflavirus; Helicoverpa armigera iflavirus; Midge iflavirus 9000; Miniopterus fuliginosus iflavirus; Moku virus; Nasonia vitripennis virus; Pirizal iflavirus; Psammotettix alienus iflavirus 1; Rondonia iflavirus 1; Rondonia iflavirus 2; Scaphoideus titanus iflavirus 1; Scaphoideus titanus iflavirus 2; VDV-1/DWV recombinant 4; Vespa velutina Moku virus; or Xysticus cristatus iflavirus.

[1173] In some embodiments, a combination or composition of the present invention comprises one or more Insecticidal Agents (IAs), and one or more CRIPs (e.g. one or more of CRIPs: A1-A68 in Table A), wherein the IA is a virus from the Baculoviridae family.

[1174] In some embodiments, a combination or composition of the present invention comprises one or more Insecticidal Agents (IAs), and one or more CRIPs (e.g. one or more of CRIPs: A1-A68 in Table A), wherein the IA is an Alphabaculovirus, Betabaculovirus, Deltabaculovirus, Gammabaculovirus, or heretofore unclassified Baculoviridae virus.

[1175] In some embodiments, a combination or composition of the present invention comprises one or more Insecticidal Agents (IAs), and one or more CRIPs (e.g. one or more of CRIPs: A1-A68 in Table A), wherein the IA is a Alphabaculovirus virus selected from the following group: Adoxophyes honmai nucleopolyhedrovirus; Agrotis ipsilon multiple nucleopolyhedrovirus; Agrotis segetum nucleopolyhedrovirus A; Agrotis segetum nucleopolyhedrovirus B; Antheraea pernyi nucleopolyhedrovirus; Antheraea proylei nucleopolyhedrovirus; Philosamia cynthia ricini nucleopolyhedrovirus virus; Anticarsia gemmatalis multiple nucleopolyhedrovirus; Autographa californica multiple nucleopolyhedrovirus; Anagrapha falcifera MNPV; Autographa californica nucleopolyhedrovirus; Galleria mellonella MNPV; Plutella xylostella multiple nucleopolyhedrovirus; Rachiplusia nu MNPV; Rachiplusia ou MNPV; Bombyx mori nucleopolyhedrovirus; Bombyx mandarina nucleopolyhedrovirus; Bombyx mandarina nucleopolyhedrovirus S2; Bombyx mori nuclear polyhedrosis virus K1; Buzura suppressaria nucleopolyhedrovirus; Catopsilia pomona nucleopolyhedrovirus; Choristoneura fumiferana DEF multiple nucleopolyhedrovirus; Choristoneura fumiferana multiple nucleopolyhedrovirus; Choristoneura occidentalis alphabaculovirus; Choristoneura murinana nucleopolyhedrovirus; Choristoneura rosaceana nucleopolyhedrovirus; Chrysodeixis chalcites nucleopolyhedrovirus; Chrysodeixis chalcites SNPV TF1-A; Chrysodeixis includens nucleopolyhedrovirus; Pseudoplusia includens SNPV IE; Clanis bilineata nucleopolyhedrovirus; Dasychira pudibunda nucleopolyhedrovirus; Ectropis obliqua nucleopolyhedrovirus; Epiphyas postvittana nucleopolyhedrovirus; Euproctis pseudoconspersa nucleopolyhedrovirus; Helicoverpa armigera nucleopolyhedrovirus; Helicoverpa armigera NPV NNg1; Helicoverpa armigera NPV strain Australia; Helicoverpa armigera nucleopolyhedrovirus G4; Helicoverpa armigera SNPV; Helicoverpa SNPV AC53; Helicoverpa zea single nucleopolyhedrovirus; Hemileuca species nucleopolyhedrovirus;

[1176] Hemileuca sp. nucleopolyhedrovirus; Hyphantria cunea nucleopolyhedrovirus; Lambdina fiscellaria nucleopolyhedrovirus; Leucania separata nucleopolyhedrovirus; Lonomia obliqua nucleopolyhedrovirus; Lonomia obliqua multiple nucleopolyhedrovirus; Lymantria dispar multiple nucleopolyhedrovirus; Lymantria xylina nucleopolyhedrovirus; Mamestra brassicae multiple nucleopolyhedrovirus; Mamestra configurata nucleopolyhedrovirus A; Mamestra configurata nucleopolyhedrovirus B; Helicoverpa armigera multiple nucleopolyhedrovirus; Maruca vitrata nucleopolyhedrovirus; Mythimna unipuncta nucleopolyhedrovirus; Operophtera brumata nucleopolyhedrovirus; Orgyia leucostigma nucleopolyhedrovirus; Orgyia pseudotsugata multiple nucleopolyhedrovirus; Oxyplax ochracea nucleopolyhedrovirus; Perigonia lusca nucleopolyhedrovirus; Perigonia lusca single nucleopolyhedrovirus; Spodoptera exigua multiple nucleopolyhedrovirus; Spodoptera exigua nuclear polyhedrosis virus (strain US); Spodoptera frugiperda multiple nucleopolyhedrovirus; Spodoptera littoralis nucleopolyhedrovirus; Spodoptera litura nucleopolyhedrovirus; Sucra jujuba nucleopolyhedrovirus; Thysanoplusia orichalcea nucleopolyhedrovirus; Trichoplusia ni single nucleopolyhedrovirus; Wiseana signata nucleopolyhedrovirus; unclassified Alphabaculovirus; Abraxas grossulariata nucleopolyhedrovirus; Actias selene nucleopolyhedrovirus; Adoxophyes orana nucleopolyhedrovirus; Agraulis vanillae MNPV; Agrotis exclamationis nucleopolyhedrovirus; Agrotis ipsilon multicapsid nucleopolyhedrovirus; Amorbia cuneacapsa nucleopolyhedrovirus; Amorbia cuneana nucleopolyhedrovirus; Ampelophaga rubiginosa nucleopolyhedrovirus; Amsacta albistriga nucleopolyhedrovirus; Anagrapha falcifera multiple nucleopolyhedrovirus; Antheraea polyphemus nucleopolyhedrovirus; Anticarsia gemmatalis nucleopolyhedrovirus; Apocheima cinerarium nucleopolyhedrovirus; Aporia crataegi nucleopolyhedrovirus; Archips cerasivoranus nuclear polyhedrosis virus; Archips rosanus nucleopolyhedrovirus; Attacus ricini nuclear polyhedrosis virus; Autographa biloba nucleopolyhedrovirus; Autographa gamma nucleopolyhedrovirus; Autographa nigrisigna nucleopolyhedrovirus; Boarmia bistortata nucleopolyhedrovirus; Bombyx mandarina nuclear polyhedrosis virus; Busseola fusca nucleopolyhedrovirus; Catposilia pomona nucleopolyhedrovirus; Cerapteryx graminis nucleopolyhedrovirus; Choristoneura diversana nucleopolyhedrovirus; Choristoneura occidentalis nucleopolyhedrovirus; Chorizagrotis auxiliaris nucleopolyhedrovirus; Chrysodeixis includens NPV; Coloradia pandora alphabaculovirus; Coloradia pandora nucleopolyhedrovirus; Condylorrhiza vestigialis MNPV; Condylorrhiza vestigialis multiple nucleopolyhedrovirus; Cryptophlebia peltastica nucleopolyhedrovirus; Cyclophragma undans nucleopolyhedrovirus; Dasychira plagiata nucleopolyhedrovirus; Dendrolimus kikuchii nucleopolyhedrovirus; Diaphania pulverulentalis nucleopolyhedrovirus; Dione Juno MNPV tmk1/ARG/2003; Dione Juno nucleopolyhedrovirus; Dirphia peruvianus nucleopolyhedrovirus; Ectropis grisescens nucleopolyhedrovirus; Epinotia granitalis nucleopolyhedrovirus; Euproctis digramma nucleopolyhedrovirus; Gilpinia hercyniae nucleopolyhedrovirus; Heliconius erato nucleopolyhedrovirus; Helicoverpa assulta nucleopolyhedrovirus; Helicoverpa gelotopoeon single nucleopolyhedrovirus; Heliothis peltigera SNPV; Heliothis zea nuclear polyhedrosis virus; Hemerocampa vetusta nucleopolyhedrovirus; Hemileuca alphabaculovirus; Hyposidra infixaria NPV; Hyposidra talaca NPV; Iragoides fasciata nucleopolyhedrovirus; Junonia coenia nucleopolyhedrovirus; Leucoma salicis nucleopolyhedrovirus; Lymantria mathura mutiple nucleopolyhedrovirus; Lymantria monacha nucleopolyhedrovirus; Lymantria xylina nucleopolyhedrovirus 2; Malacosoma alphabaculovirus; Malacosoma americanum nucleopolyhedrovirus; Malacosoma californicum nucleopolyhedrovirus; Malacosoma californicum pluviale nucleopolyhedrovirus; Malacosoma disstria nucleopolyhedrovirus; Malacosoma neustria nucleopolyhedrovirus; Mamestra configurata nucleopolyhedrovirus; Neophasia alphabaculovirus; Nepytia phantasmaria nucleopolyhedrovirus; Nymphalis io nucleopolyhedrovirus; Oak looper alphabaculovirus; Ophiusa disjungens nucleopolyhedrovirus; Orgyia anartoides nucleopolyhedrovirus; Orgyia ericae nucleopolyhedrovirus; Orgyia pseudotsugata single capsid nuclopolyhedrovirus; Panolis flammea nucleopolyhedrovirus; Peridroma alphabaculovirus; Peridroma margaritosa nucleopolyhedrovirus; Perina nuda nucleopolyhedrovirus; Phryganidia californica nucleopolyhedrovirus; Plusia acuta nucleopolyhedrovirus; Plusia orichalcea nuclear polyhedrosis virus; Plutella maculipennis nucleopolyhedrovirus; Pseudaletia alphabaculovirus; Pseudoplusia includens nucleopolyhedrovirus; Pterolocera amplicornis nucleopolyhedrovirus; Rachiplusia nu nucleopolyhedrovirus; Rachiplusia nu single nucleopolyhedrovirus; Samia cynthia nucleopolyhedrovirus; Spilarctia obliqua nucleopolyhedrovirus; Spilosoma obliqua nucleopolyhedrosis virus; Spilosoma phasma nucleopolyhedrovirus; Spodoptera cosmioides nucleopolyhedrovirus; Spodoptera eridania nucleopolyhedrovirus; Spodoptera exempta nucleopolyhedrovirus; Spodoptera littoralis multicapsid nucleopolyhedrovirus; Spodoptera litura MNPV; Spodoptera litura nucleopolyhedrovirus II; Spodoptera terricola nucleopolyhedrovirus; Tineola bisselliella nucleopolyhedrovirus; Troides aeacus nucleopolyhedrovirus; Wiseana cervinata nucleopolyhedrovirus; Agraulis sp. nucleopolyhedrovirus; Malacosoma sp. alphabaculovirus;

[1177] Malacosoma sp. nucleopolyhedrovirus; Neophasia sp. alphabaculovirus; and unidentified nuclear polyhedrosis viruses.

[1178] In some embodiments, a combination or composition of the present invention comprises one or more Insecticidal Agents (IAs), and one or more CRIPs (e.g. one or more of CRIPs: A1-A68 in Table A), wherein the IA is a Betabaculovirus virus selected from the following group: Adoxophyes orana granulovirus; Agrotis segetum granulovirus; Artogeia rapae granulovirus; Pieris brassicae granulovirus; Choristoneura fumiferana granulovirus; Choristoneura occidentalis granulovirus; Clostera anachoreta granulovirus; Clostera anastomosis granulovirus A; Clostera anastomosis granulovirus Henan; Clostera anastomosis granulovirus B; Cnaphalocrocis medinalis granulovirus; Cryptophlebia leucotreta granulovirus; Cydia pomonella granulovirus; Cydia pomonella granulosis virus (isolate Mexican); Diatraea saccharalis granulovirus; Epinotia aporema granulovirus; Erinnyis ello granulovirus; Harrisina brillians granulovirus; Helicoverpa armigera granulovirus; Lacanobia oleracea granulovirus; Mocis latipes granulovirus; Mythimna unipuncta granulovirus A; Pseudalatia unipuncta granulovirus; Mythimna unipuncta granulovirus B; Mythimna unipuncta granulovirus; Phthorimaea operculella granulovirus; Plodia interpunctella granulovirus; Plutella xylostella granulovirus; Spodoptera frugiperda granulovirus; Spodoptera litura granulovirus; Trichoplusia ni granulovirus; Trichoplusia ni granulovirus LBIV-12; Xestia c-nigrum granulovirus; Achaea janata granulovirus; Adoxophyes honmai granulovirus; Agrotis exclamationis granulovirus; Amelia pallorana granulovirus; Andraca bipunctata granulovirus; Autographa gamma granulovirus; Caloptilia theivora granulovirus; Choristoneura murinana granulovirus; Choristoneura viridis betabaculovirus; Clostera anastomosis granulovirus; Cnephasia longana granulovirus; Estigmene acrea granulovirus; Euxoa ochrogaster granulovirus; Heliothis armigera granulovirus; Hoplodrina ambigua granulovirus; Hyphantria cunea granulovirus; Natada nararia granulovirus; Nephelodes emmedonia granulovirus; Pandemis limitata granulovirus; Peridorma morpontora granulovirus; Pieris rapae granulovirus; Plathypena scabra granulovirus; Pseudaletia betabaculovirus; Scotogramma trifolii granulovirus; Spodoptera androgea granulovirus; Spodoptera littoralis granulovirus; Tecia solanivora granulovirus; and Mocis sp. granulovirus.

[1179] In some embodiments, a combination or composition of the present invention comprises one or more Insecticidal Agents (IAs), and one or more CRIPs (e.g. one or more of CRIPs: A1-A68 in Table A), wherein the IA is a Deltabaculovirus virus selected from the following group: Culex nigripalpus nucleopolyhedrovirus; and Culex nigripalpus NPV Florida/1997.

[1180] In some embodiments, a combination or composition of the present invention comprises one or more Insecticidal Agents (IAs), and one or more CRIPs (e.g. one or more of CRIPs: A1-A68 in Table A), wherein the IA is a Gammabaculovirus virus selected from the following group: Neodiprion lecontei nucleopolyhedrovirus; Neodiprion lecontei NPV (strain Canada); Neodiprion sertifer nucleopolyhedrovirus; unclassified Gammabaculovirus; and Neodiprion abietis NPV.

[1181] In some embodiments, a combination or composition of the present invention comprises one or more Insecticidal Agents (IAs), and one or more CRIPs (e.g. one or more of CRIPs: A1-A68 in Table A), wherein the IA is a heretofore unclassified Baculoviridae virus selected from the following group: Achaea faber nucleopolyhedrovirus; Aedes sollicitans nucleopolyhedrovirus; Aglais urticae nucleopolyhedrovirus; Agraulis vanillae nucleopolyhedrovirus; Anomis sabulifera nucleopolyhedrovirus; Antheraea yamamai nucleopolyhedrovirus; Anthophila fabriciana granulovirus; Aroa discalis nucleopolyhedrovirus; Baculovirus penaei; Cadra cautella nucleopolyhedrovirus; Chaliopsis junodi nucleopolyhedrovirus; Cotesia marginiventris baculovirus; Cynosarga ornata nucleopolyhedrovirus; Darna nararia granulovirus; Darna trima granulovirus; Erannis defoliaria nucleopolyhedrovirus; Euplexia lucipara granulovirus; Euproctis chrysorrhoea nucleopolyhedrovirus; Euproctis similis nucleopolyhedrovirus; Gonad-specific virus; Homona coffearia granulovirus; Hyblaea puera nucleopolyhedrovirus; Idaea seriata nucleopolyhedrovirus; Junonia coenia granulovirus; Lasiocampa quercus nucleopolyhedrovirus; Lemyra imparilis nucleopolyhedrovirus; Mahasena corbetti nucleopolyhedrovirus; Melanchra persicariae granulovirus; Operophtera bruceata nucleopolyhedrovirus; Orgyia antiqua nucleopolyhedrovirus; Orgyia mixta nucleopolyhedrovirus; Pachytrina philargyria nucleopolyhedrovirus; Pareuchaetes pseudoinsulata nucleopolyhedrovirus; Penaeus monodon nucleopolyhedrovirus; Phalera bucephala nucleopolyhedrovirus; Polygonia c-album nucleopolyhedrovirus; Samia ricini nucleopolyhedrovirus; Spilosoma lutea granulovirus; Spodoptera albula nucleopolyhedrovirus; Trabala vishnou nucleopolyhedrovirus; Uranotaenia sapphirina nucleopolyhedrovirus; Urbanus proteus nucleopolyhedrovirus; Utetheisa pulchella nucleopolyhedrovirus; Vanessa atalanta nucleopolyhedrovirus; Vanessa cardui nucleopolyhedrovirus; and Wiseana cervinata granulovirus.

[1182] In some embodiments, a combination or composition of the present invention comprises one or more Insecticidal Agents (IAs), and one or more CRIPs (e.g. one or more of CRIPs: A1-A68 in Table A), wherein the IA is a Adoxophyes orana granulovirus; a Agrotis segetum granulovirus; a Artogeia rapae granulovirus; a Pieris brassicae granulovirus; a Choristoneura fumiferana granulovirus; a Choristoneura occidentalis granulovirus; a Clostera anachoreta granulovirus; a Clostera anastomosis granulovirus A; a Clostera anastomosis granulovirus Henan; a Clostera anastomosis granulovirus B; a Cnaphalocrocis medinalis granulovirus; a Cryptophlebia leucotreta granulovirus; a Cydia pomonella granulovirus; a Cydia pomonella granulosis virus (isolate Mexican); a Diatraea saccharalis granulovirus; a Epinotia aporema granulovirus; a Erinnyis ello granulovirus; a Harrisina brillians granulovirus; a Helicoverpa armigera granulovirus; a Lacanobia oleracea granulovirus; a Mocis latipes granulovirus; a Mythimna unipuncta granulovirus A; a Pseudalatia unipuncta granulovirus; a Mythimna unipuncta granulovirus B; a Mythimna unipuncta granulovirus; a Phthorimaea operculella granulovirus; a Plodia interpunctella granulovirus; a Plutella xylostella granulovirus; a Spodoptera frugiperda granulovirus; a Spodoptera litura granulovirus; a Trichoplusia ni granulovirus; a Trichoplusia ni granulovirus LBIV-12; a Xestia c-nigrum granulovirus; a unclassified Betabaculovirus; a Achaea janata granulovirus; a Adoxophyes honmai granulovirus; a Agrotis exclamationis granulovirus; a Amelia pallorana granulovirus; a Andraca bipunctata granulovirus; a Autographa gamma granulovirus; a Caloptilia theivora granulovirus; a Choristoneura murinana granulovirus; a Choristoneura viridis betabaculovirus; a Clostera anastomosis granulovirus; a Cnephasia longana granulovirus; a Estigmene acrea granulovirus; a Euxoa ochrogaster granulovirus; a Heliothis armigera granulovirus; a Hoplodrina ambigua granulovirus; a Hyphantria cunea granulovirus; a Natada nararia granulovirus; a Nephelodes emmedonia granulovirus; a Pandemis limitata granulovirus; a Peridorma morpontora granulovirus; a Pieris rapae granulovirus; a Plathypena scabra granulovirus; a Pseudaletia betabaculovirus; a Scotogramma trifolii granulovirus; a Spodoptera androgea granulovirus; a Spodoptera littoralis granulovirus; a Tecia solanivora granulovirus; or a Mocis sp. Granulovirus.

[1183] In some embodiments, a combination or composition of the present invention comprises one or more Insecticidal Agents (IAs), and one or more CRIPs (e.g. one or more of CRIPs: A1-A68 in Table A), wherein the IA is a Cydia pomonella granulovirus.

[1184] In some embodiments, a combination or composition of the present invention comprises one or more Insecticidal Agents (IAs), and one or more CRIPs (e.g. one or more of CRIPs: A1-A68 in Table A), wherein the IA is a Cydia pomonella granulovirus isolate V22 virus.

[1185] Combinations: Bacteria/Bacterial Toxins and CRIPs

[1186] In some embodiments, a combination or composition of the present invention comprises one or more Insecticidal Agents (IAs), and one or more CRIPs (e.g. one or more of CRIPs: A1-A68 in Table A), wherein the IA is a bacteria.

[1187] In some embodiments, a combination or composition of the present invention comprises one or more Insecticidal Agents (IAs), and one or more CRIPs (e.g. one or more of CRIPs: A1-A68 in Table A), wherein the IA is a peptide or toxin isolated from a bacteria.

[1188] In some embodiments, a combination or composition of the present invention comprises one or more Insecticidal Agents (IAs), and one or more CRIPs (e.g. one or more of CRIPs: A1-A68 in Table A), wherein the IA is a bacterial toxin.

[1189] Photorhabdus and/or the Toxins Therefrom

[1190] In some embodiments, a combination or composition of the present invention comprises one or more Insecticidal Agents (IAs), and one or more CRIPs (e.g. one or more of CRIPs: A1-A68 in Table A), wherein the IA is a bacterial toxin isolated from a bacteria belonging to the Xenorhabdus genus, or Photorhabdus genus.

[1191] In some embodiments, a combination or composition of the present invention comprises one or more Insecticidal Agents (IAs), and one or more CRIPs (e.g. one or more of CRIPs: A1-A68 in Table A), wherein the IA is a Photorhabdus toxin.

[1192] In some embodiments, a combination or composition of the present invention comprises one or more Insecticidal Agents (IAs), and one or more CRIPs (e.g. one or more of CRIPs: A1-A68 in Table A), wherein the IA is a Photorhabdus toxin selected from the group consisting of: Photorhabdus akhurstii toxin; Photorhabdus asymbiotica toxin; Photorhabdus asymbiotica subsp. asymbiotica toxin; Photorhabdus asymbiotica subsp. asymbiotica ATCC 43949 toxin; Photorhabdus australis toxin; Photorhabdus australis DSM 17609 toxin; Photorhabdus bodei toxin; Photorhabdus caribbeanensis toxin; Photorhabdus cinerea toxin; Photorhabdus hainanensis toxin; Photorhabdus heterorhabditis toxin; Photorhabdus kayaii toxin; Photorhabdus khanii toxin; Photorhabdus khanii NC19 toxin; Photorhabdus khanii subsp. guanajuatensis toxin; Photorhabdus kleinii toxin; Photorhabdus laumondii toxin; Photorhabdus laumondii subsp. clarkei toxin; Photorhabdus laumondii subsp. laumondii toxin; Photorhabdus laumondii subsp. laumondii TTO1 toxin; Photorhabdus luminescens toxin; Photorhabdus luminescens BA1 toxin; Photorhabdus luminescens NBAII H75HRPL105 toxin; Photorhabdus luminescens NBAII HiPL101 toxin; Photorhabdus luminescens subsp. luminescens toxin; Photorhabdus luminescens subsp. luminescens ATCC 29999 toxin; Photorhabdus luminescens subsp. mexicana toxin; Photorhabdus luminescens subsp. sonorensis toxin; Photorhabdus namnaonensis toxin; Photorhabdus noenieputensis toxin; Photorhabdus stackebrandtii toxin; Photorhabdus tasmaniensis toxin; Photorhabdus temperata toxin; Photorhabdus temperata J3 toxin; Photorhabdus temperata subsp. phorame toxin; Photorhabdus temperata subsp. temperata toxin; Photorhabdus temperata subsp. temperata M1021 toxin; Photorhabdus temperata subsp. temperata Meg1 toxin; Photorhabdus thracensis toxin; unclassified Photorhabdus toxin; Photorhabdus sp. toxin; Photorhabdus sp. 3014 toxin; Photorhabdus sp. 3240 toxin; Photorhabdus sp. Az29 toxin; Photorhabdus sp. B S21 toxin; Photorhabdus sp. CbKj163 toxin; Photorhabdus sp. CRCIA-P01 toxin; Photorhabdus sp. ENY toxin; Photorhabdus sp. FL2122 toxin; Photorhabdus sp. FL480 toxin; Photorhabdus sp. FsIw96 toxin; Photorhabdus sp. GDd233 toxin; Photorhabdus sp. H3086 toxin; Photorhabdus sp. H3107 toxin; Photorhabdus sp. H3240 toxin; Photorhabdus sp. HB301 toxin; Photorhabdus sp. HB78 toxin; Photorhabdus sp. HB89 toxin; Photorhabdus sp. HIT toxin; Photorhabdus sp. HO1 toxin; Photorhabdus sp. HUG-39 toxin; Photorhabdus sp. IT toxin; Photorhabdus sp. JUN toxin; Photorhabdus sp. KcTs129 toxin; Photorhabdus sp. KJ13.1 TH toxin; Photorhabdus sp. KJ14.3 TH toxin; Photorhabdus sp. KJ24.5 TH toxin; Photorhabdus sp. KJ29.1 TH toxin; Photorhabdus sp. KJ37.1 TH toxin; Photorhabdus sp. KJ7.1 TH toxin; Photorhabdus sp. KJ8.2 TH toxin; Photorhabdus sp. KJ9.1 TH toxin; Photorhabdus sp. KJ9.2 TH toxin; Photorhabdus sp. KK1.3 TH toxin; Photorhabdus sp. KK1.4 TH toxin; Photorhabdus sp. KMD74 toxin; Photorhabdus sp. KOH toxin; Photorhabdus sp. MID10 toxin; Photorhabdus sp. MOL toxin; Photorhabdus sp. MSW 058 toxin; Photorhabdus sp. MSW 079 toxin; Photorhabdus sp. NK2.1 TH toxin; Photorhabdus sp. NK2.5 TH toxin; Photorhabdus sp. NnMt2h toxin; Photorhabdus sp. NP1 toxin; Photorhabdus sp. OH10 toxin; Photorhabdus sp. OnIr40 toxin; Photorhabdus sp. OnKn2 toxin; Photorhabdus sp. PB10.1 TH toxin; Photorhabdus sp. PB16.3 TH toxin; Photorhabdus sp. PB17.1 TH toxin; Photorhabdus sp. PB17.3 TH toxin; Photorhabdus sp. PB2.5 TH toxin; Photorhabdus sp. PB22.4 TH toxin; Photorhabdus sp. PB22.5 TH toxin; Photorhabdus sp. PB32.1 TH toxin; Photorhabdus sp. PB33.1 TH toxin; Photorhabdus sp. PB33.4 TH toxin; Photorhabdus sp. PB37.4 TH toxin; Photorhabdus sp. PB39.2 TH toxin; Photorhabdus sp. PB4.5 TH toxin; Photorhabdus sp. PB41.4 TH toxin; Photorhabdus sp. PB45.5 TH toxin; Photorhabdus sp. PB47.1 TH toxin; Photorhabdus sp. PB47.3 TH toxin; Photorhabdus sp. PB5.1 TH toxin; Photorhabdus sp. PB5.4 TH toxin; Photorhabdus sp. PB50.4 TH toxin; Photorhabdus sp. PB51.4 TH toxin; Photorhabdus sp. PB52.2 TH toxin; Photorhabdus sp. PB54.4 TH toxin; Photorhabdus sp. PB58.2 TH toxin; Photorhabdus sp. PB58.4 TH toxin; Photorhabdus sp. PB58.5 TH toxin; Photorhabdus sp. PB59.2 TH toxin; Photorhabdus sp. PB6.5 TH toxin; Photorhabdus sp. PB67.2 TH toxin;

[1193] Photorhabdus sp. PB67.4 TH toxin; Photorhabdus sp. PB68.1 TH toxin; Photorhabdus sp. PB7.5 TH toxin; Photorhabdus sp. PB76.1 TH toxin; Photorhabdus sp. PB76.4 TH toxin; Photorhabdus sp. PB76.5 TH toxin; Photorhabdus sp. PB78.2 TH toxin; Photorhabdus sp. PB80.3 TH toxin; Photorhabdus sp. PB80.4 TH toxin; Photorhabdus sp. Pjun toxin; Photorhabdus sp. RW14-46 toxin; Photorhabdus sp. S10-54 toxin; Photorhabdus sp. S12-55 toxin; Photorhabdus sp. S14-60 toxin; Photorhabdus sp. S15-56 toxin; Photorhabdus sp. S5P8-50 toxin; Photorhabdus sp. S7-51 toxin; Photorhabdus sp. S8-52 toxin; Photorhabdus sp. S9-53 toxin; Photorhabdus sp. 5.12 toxin; Photorhabdus sp. SN259 toxin; Photorhabdus sp. SP1.5 TH toxin; Photorhabdus sp. SP16.4 TH toxin; Photorhabdus sp. SP21.5 TH toxin; Photorhabdus sp. SP3.4 TH toxin; Photorhabdus sp. SP4.5 TH toxin; Photorhabdus sp. SP7.3 TH toxin; Photorhabdus sp. TyKb140 toxin; Photorhabdus sp. UK76 toxin; Photorhabdus sp. VMG toxin; Photorhabdus sp. WA21C toxin; Photorhabdus sp. WkSs43 toxin; Photorhabdus sp. Wx13 toxin; Photorhabdus sp. X₄ toxin; Photorhabdus sp. YNb90 toxin; and Photorhabdus sp. ZM toxin.

[1194] In some embodiments, a combination or composition of the present invention comprises one or more Insecticidal Agents (IAs), and one or more CRIPs (e.g. one or more of CRIPs: A1-A68 in Table A), wherein the IA is a Photorhabdus luminescens toxin.

[1195] In some embodiments, a combination or composition of the present invention comprises one or more Insecticidal Agents (IAs), and one or more CRIPs (e.g. one or more of CRIPs: A1-A68 in Table A), wherein the IA is a Photorhabdus luminescens toxin, wherein the Photorhabdus luminescens toxin comprises a Photorhabdus luminescens “toxin complex a” (Tca).

[1196] In some embodiments, a combination or composition of the present invention comprises one or more Insecticidal Agents (IAs), and one or more CRIPs (e.g. one or more of CRIPs: A1-A68 in Table A), wherein the IA is a Photorhabdus luminescens toxin, wherein the Photorhabdus luminescens toxin comprises a Photorhabdus luminescens “toxin complex c” (Tcc).

[1197] In some embodiments, a combination or composition of the present invention comprises one or more Insecticidal Agents (IAs), and one or more CRIPs (e.g. one or more of CRIPs: A1-A68 in Table A), wherein the IA is a Photorhabdus luminescens toxin, wherein the Photorhabdus luminescens toxin comprises a Photorhabdus luminescens “toxin complex d” (Tcd).

[1198] In some embodiments, a combination or composition of the present invention comprises one or more Insecticidal Agents (IAs), and one or more CRIPs (e.g. one or more of CRIPs: A1-A68 in Table A), wherein the IA is a Tca comprising a TcaA protein (SEQ ID NO: 616), a TcaB protein (SEQ ID NO: 617), a TcaC protein (SEQ ID NO: 618), and a TcaZ protein (SEQ ID NO: 619).

[1199] In some embodiments, a combination or composition of the present invention comprises one or more Insecticidal Agents (IAs), and one or more CRIPs (e.g. one or more of CRIPs: A1-A68 in Table A), wherein the IA is a Photorhabdus luminescens “toxin complex a” (Tca) having an amino acid sequence that is at least 50% identical, at least 55% identical, at least 60% identical, at least 65% identical, at least 70% identical, at least 75% identical, at least 80% identical, at least 81% identical, at least 82% identical, at least 83% identical, at least 84% identical, at least 85% identical, at least 86% identical, at least 87% identical, at least 88% identical, at least 89% identical, at least 90% identical, at least 91% identical, at least 92% identical, at least 93% identical, at least 94% identical, at least 95% identical, at least 96% identical, at least 97% identical, at least 98% identical, at least 99% identical, at least 99.5% identical, at least 99.6% identical, at least 99.7% identical, at least 99.8% identical, at least 99.9% identical, or 100% identical to an amino acid sequence set forth in a SEQ ID NO: 616-619.

[1200] Yersinia Organisms, and the Products Therefrom

[1201] In some embodiments, a combination or composition of the present invention comprises one or more Insecticidal Agents (IAs), and one or more CRIPs (e.g. one or more of CRIPs: A1-A68 in Table A), wherein the IA is one or more organisms belonging to the Yersinia genus.

[1202] In some embodiments, a combination or composition of the present invention comprises one or more Insecticidal Agents (IAs), and one or more CRIPs (e.g. one or more of CRIPs: A1-A68 in Table A), wherein the IA is one or more peptides isolated from an organism belonging to the Yersinia genus.

[1203] In some embodiments, a combination or composition of the present invention comprises one or more Insecticidal Agents (IAs), and one or more CRIPs (e.g. one or more of CRIPs: A1-A68 in Table A), wherein the IA is one or more of the following species: Yersinia aldovaeyb, Yersinia aleksiciae, Yersinia bercovieri, Yersinia canariae, Yersinia enterocolitica, Yersinia enterocolitica subsp. enterocolitica, Yersinia enterocolitica subsp. palearctica, Yersinia entomophaga, Yersinia frederiksenii, Yersinia hibernica, Yersinia intermedia, Yersinia kristensenii, Yersinia kristensenii subsp. kristensenii, Yersinia kristensenii subsp. rochesterensis, Yersinia massiliensis, Yersinia mollaretii, Yersinia nurmii, Yersinia pekkanenii, Yersinia pestis, Yersinia pestis subsp. pestis, Yersinia pestis subsp. medievalis, Yersinia pestis subsp. orientalis, Yersinia pseudotuberculosis, Yersinia pseudotuberculosis subsp. pestis, Yersinia pseudotuberculosis subsp. pseudotuberculosis, Yersinia rohdei, Yersinia ruckeri, Yersinia similis, or Yersinia wautersii.

[1204] In some embodiments, a combination or composition of the present invention comprises one or more Insecticidal Agents (IAs), and one or more CRIPs (e.g. one or more of CRIPs: A1-A68 in Table A), wherein the IA is one or more peptides isolated from one or more of the following species: Yersinia aldovaeyb, Yersinia aleksiciae, Yersinia bercovieri, Yersinia canariae, Yersinia enterocolitica, Yersinia enterocolitica subsp. enterocolitica, Yersinia enterocolitica subsp. palearctica, Yersinia entomophaga, Yersinia frederiksenii, Yersinia hibernica, Yersinia intermedia, Yersinia kristensenii, Yersinia kristensenii subsp. kristensenii, Yersinia kristensenii subsp. rochesterensis, Yersinia massiliensis, Yersinia mollaretii, Yersinia nurmii, Yersinia pekkanenii, Yersinia pestis, Yersinia pestis subsp. pestis, Yersinia pestis subsp. medievalis, Yersinia pestis subsp. orientalis, Yersinia pseudotuberculosis, Yersinia pseudotuberculosis subsp. pestis, Yersinia pseudotuberculosis subsp. pseudotuberculosis, Yersinia rohdei, Yersinia ruckeri, Yersinia similis, or Yersinia wautersii.

[1205] In some embodiments, a combination or composition of the present invention comprises one or more Insecticidal Agents (IAs), and one or more CRIPs (e.g. one or more of CRIPs: A1-A68 in Table A), wherein the IA is a Yersinia entomophaga or Yersinia nurmii.

[1206] In some embodiments, a combination or composition of the present invention comprises one or more Insecticidal Agents (IAs), and one or more CRIPs (e.g. one or more of CRIPs: A1-A68 in Table A), wherein the IA is one or more peptides isolated from Yersinia entomophaga or Yersinia nurmii.

[1207] In some embodiments, a combination or composition of the present invention comprises one or more Insecticidal Agents (IAs), and one or more CRIPs (e.g. one or more of CRIPs: A1-A68 in Table A), wherein the IA is a “Yen-TC” toxin complex (TC).

[1208] In some embodiments, a combination or composition of the present invention comprises one or more Insecticidal Agents (IAs), and one or more CRIPs (e.g. one or more of CRIPs: A1-A68 in Table A), wherein the IA is one or more TC proteins.

[1209] In some embodiments, a combination or composition of the present invention comprises one or more Insecticidal Agents (IAs), and one or more CRIPs (e.g. one or more of CRIPs: A1-A68 in Table A), wherein the IA is TcA, TcB, and TcC.

[1210] In some embodiments, a combination or composition of the present invention comprises one or more Insecticidal Agents (IAs), and one or more CRIPs (e.g. one or more of CRIPs: A1-A68 in Table A), wherein the IA is a Yersinia entomophaga bacteria, and/or a toxin therefrom.

[1211] In some embodiments, a combination or composition of the present invention comprises one or more Insecticidal Agents (IAs), and one or more CRIPs (e.g. one or more of CRIPs: A1-A68 in Table A), wherein the IA is one or more Yersinia nurmii bacteria, and/or a toxin therefrom.

[1212] In some embodiments, a combination or composition of the present invention comprises one or more Insecticidal Agents (IAs), and one or more CRIPs (e.g. one or more of CRIPs: A1-A68 in Table A), wherein the IA is one or more Yersinia entomophaga bacteria and/or a toxin therefrom, and one or more Yersinia nurmii bacteria and/or a toxin therefrom.

[1213] Combinations: Bt Toxins, CRIPs, and combinations thereof.

[1214] In some embodiments, a combination or composition can comprise any one or more CRIPs in Table A, combined with one or more IAs contained in IA Group No. 8; e.g., IA Nos. B124-B150.

[1215] In some embodiments, a combination or composition can comprise: (1) one or more of CRIPs: A1-A68; and (2) one or more Bt peptides and/or toxins.

[1216] In some embodiments, a combination or composition can comprise: (1) one or more of CRIPs: A1-A68; and (2) one or more Bt peptides; wherein the combination or composition further comprises an additional agent (e.g., one or more pesticides and/or insecticides as described herein).

[1217] In some embodiments, a combination or composition can comprise: (1) one or more of CRIPs: A1-A68; and (2) one or more Bt peptides; wherein the combination or composition further comprises an excipient.

[1218] In some embodiments, the method of controlling an insect comprises: applying a Bacillus thuringiensis (Bt) protein to the locus of an insect; and then applying one or more of CRIPs: A1-A68 to the locus of said insect, wherein said Bt and/or CRIP is applied either concomitantly or sequentially.

[1219] In some embodiments, a combination and/or composition can comprise one or more of CRIPs: A1-A68, and one or more Bt toxins, e.g., a Cry protein, a Cyt protein, or a Vip protein, as described herein and/or enumerated in the tables herein and/or in the sequence listing.

[1220] In some embodiments, one or more of CRIPs: A1-A68 can be combined with a protein isolated from Bacillus thuringiensis. For example, in some embodiments, one or more of CRIPs: A1-A68 can be combined with an δ-endotoxin (e.g., Crystal (Cry) toxins and/or cytolytic (Cyt) toxins); vegetative insecticidal proteins (Vips); secreted insecticidal protein (Sips); or Bin-like toxins.

[1221] In some embodiments, the present invention provides for a combination comprising one or more of CRIPs: A1-A68 and a Bacillus thuringiensis (Bt) toxin; wherein the Bt toxin is a parasporal crystal toxin, a secreted protein, a β-exotoxin, a 41.9-kDa insecticidal toxin, a sphaericolysin, an alveolysin, or an enhancin-like protein.

[1222] In some embodiments, the present invention provides for a combination comprising one or more of CRIPs: A1-A68 and a Bacillus thuringiensis (Bt) toxin; wherein the Bt toxin is a parasporal crystal toxin, and wherein the parasporal crystal toxin is a 6-endotoxin.

[1223] In some embodiments, the present invention provides for a combination comprising one or more of CRIPs: A1-A68 and a Bacillus thuringiensis (Bt) toxin; wherein the Bt toxin is an δ-endotoxin that is a Three-domain (3D) Cry family protein, binary Bin-like family toxin, ETX_MTX2-like family toxin, Toxin-10 family toxin, Aerolysin family toxin or cytolysin.

[1224] In some embodiments, the present invention provides for a combination comprising one or more of CRIPs: A1-A68 and a Bacillus thuringiensis (Bt) toxin; wherein the Bt toxin is an δ-endotoxin that is a Three-domain (3D) Cry toxin, mosquitocidal Cry toxin (Mtx), binary-like (Bin) toxin, or Cyt toxin.

[1225] In some embodiments, the present invention provides for a combination comprising one or more of CRIPs: A1-A68 and a Bacillus thuringiensis (Bt) toxin; wherein the Bt toxin is an δ-endotoxin that is a Three-domain (3D) Cry toxin or a Cyt toxin.

[1226] In some embodiments, a combination or composition comprises one or more of CRIPs: A1-A68, that is combined with one or more of the following Cry proteins: Cry1Aa1, Cry1Aa2, Cry1Aa3, Cry1Aa4, Cry1Aa5, Cry1Aa6, Cry1Aa7, Cry1Aa8, Cry1Aa9, Cry1Aa10, Cry1Aa11, Cry1Aa12, Cry1Aa13, Cry1Aa14, Cry1Aa15, Cry1Aa16, Cry1Aa17, Cry1Aa18, Cry1Aa19, Cry1Aa20, Cry1Aa21, Cry1Aa22, Cry1Aa23, Cry1Aa24, Cry1Aa25, Cry1Ab1, Cry1Ab2, Cry1Ab3, Cry1Ab4, Cry1Ab5, Cry1Ab6, Cry1Ab7, Cry1Ab8, Cry1Ab9, Cry1Ab10, Cry1Ab11, Cry1Ab12, Cry1Ab13, Cry1Ab14, Cry1Ab15, Cry1Ab16, Cry1Ab17, Cry1Ab18, Cry1Ab19, Cry1Ab20, Cry1Ab21, Cry1Ab22, Cry1Ab23, Cry1Ab24, Cry1Ab25, Cry1Ab26, Cry1Ab27, Cry1Ab28, Cry1Ab29, Cry1Ab30, Cry1Ab31, Cry1Ab32, Cry1Ab33, Cry1Ab34, Cry1Ab35, Cry1Ab36, Cry1Ab-like, Cry1Ab-like, Cry1Ab-like, Cry1Ab-like, Cry1Ac1, Cry1Ac2, Cry1Ac3, Cry1Ac4, Cry1Ac5, Cry1Ac6, Cry1Ac7, Cry1Ac8, Cry1Ac9, Cry1Ac10, Cry1Ac11, Cry1Ac12, Cry1Ac13, Cry1Ac14, Cry1Ac15, Cry1Ac16, Cry1Ac17, Cry1Ac18, Cry1Ac19, Cry1Ac20, Cry1Ac21, Cry1Ac22, Cry1Ac23, Cry1Ac24, Cry1Ac25, Cry1Ac26, Cry1Ac27, Cry1Ac28, Cry1Ac29, Cry1Ac30, Cry1Ac31, Cry1Ac32, Cry1Ac33, Cry1Ac34, Cry1Ac35, Cry1Ac36, Cry1Ac37, Cry1Ac38, Cry1Ac39, Cry1Ad1, Cry1Ad2, Cry1Ae1, Cry1Af1, Cry1Ag1, Cry1Ah1, Cry1Ah2, Cry1Ah3, Cry1Ai1, Cry1Ai2, Cry1Aj1, Cry1A-like, Cry1Ba1, Cry1Ba2, Cry1Ba3, Cry1Ba4, Cry1Ba5, Cry1Ba6, Cry1Ba7, Cry1Ba8, Cry1Bb1, Cry1Bb2, Cry1Bb3, Cry1Bc1, Cry1Bd1, Cry1Bd2, Cry1Bd3, Cry1Be1, Cry1Be2, Cry1Be3, Cry1Be4, Cry1Be5, Cry1Bf1, Cry1Bf2, Cry1Bg1, Cry1Bh1, Cry1Bi1, Cry1Bj1, Cry1Ca1, Cry1Ca2, Cry1Ca3, Cry1Ca4, Cry1Ca5, Cry1Ca6, Cry1Ca7, Cry1Ca8, Cry1Ca9, Cry1Ca10, Cry1Ca11, Cry1Ca12, Cry1Ca13, Cry1Ca14, Cry1Ca15, Cry1Cb1, Cry1Cb2, Cry1Cb3, Cry1Cb-like, Cry1Da1, Cry1Da2, Cry1Da3, Cry1Da4, Cry1Da5, Cry1db1, Cry1db2, Cry1Dc1, Cry1Dd1, Cry1Ea1, Cry1Ea2, Cry1Ea3, Cry1Ea4, Cry1Ea5, Cry1Ea6, Cry1Ea7, Cry1Ea8, Cry1Ea9, Cry1Ea10, Cry1Ea11, Cry1Ea12, Cry1Eb1, Cry1Fa1, Cry1Fa2, Cry1Fa3, Cry1Fa4, Cry1Fb1, Cry1Fb2, Cry1Fb3, Cry1Fb4, Cry1Fb5, Cry1Fb6, Cry1Fb7, Cry1Ga1, Cry1Ga2, Cry1Gb1, Cry1Gb2, Cry1Gc1, Cry1Ha1, Cry1Hb1, Cry1Hb2, Cry1Hc1, Cry1H-like, Cry1Ia1, Cry1Ia2, Cry1Ia3, Cry1Ia4, Cry1Ia5, Cry1Ia6, Cry1Ia7, Cry1Ia8, Cry1Ia9, Cry1Ia10, Cry1Ia11, Cry1Ia12, Cry1Ia13, Cry1Ia14, Cry1Ia15, Cry1Ia16, Cry1Ia17, Cry1Ia18, Cry1Ia19, Cry1Ia20, Cry1Ia21, Cry1Ia22, Cry1Ia23, Cry1Ia24, Cry1Ia25, Cry1Ia26, Cry1Ia27, Cry1Ia28, Cry1Ia29, Cry1Ia30, Cry1Ia31, Cry1Ia32, Cry1Ia33, Cry1Ia34, Cry1Ia35, Cry1Ia36, Cry1Ia37, Cry1Ia38, Cry1Ia39, Cry1Ia40, Cry1Ib1, Cry1Ib2, Cry1Ib3, Cry1Ib4, Cry1Ib5, Cry1Ib6, Cry1Ib7, Cry1Ib8, Cry1Ib9, Cry1Ib10, Cry1Ib11, Cry1Ic1, Cry1Ic2, Cry1Id1, Cry1Id2, Cry1Id3, Cry1Ie1, Cry1Ie2, Cry1Ie3, Cry1Ie4, Cry1Ie5, Cry1If1, Cry1Ig1, Cry11-like, Cry11-like, Cry1Ja1, Cry1Ja2, Cry1Ja3, Cry1Jb1, Cry1Jc1, Cry1Jc2, Cry1Jd1, Cry1Ka1, Cry1Ka2, Cry1La1, Cry1La2, Cry1La3, Cry1Ma1, Cry1Ma2, Cry1Na1, Cry1Na2, Cry1Na3, Cry1Nb1, Cry1-like, Cry2Aa1, Cry2Aa2, Cry2Aa3, Cry2Aa4, Cry2Aa5, Cry2Aa6, Cry2Aa7, Cry2Aa8, Cry2Aa9, Cry2Aa10, Cry2Aa11, Cry2Aa12, Cry2Aa13, Cry2Aa14, Cry2Aa15, Cry2Aa16, Cry2Aa17, Cry2Aa18, Cry2Aa19, Cry2Aa20, Cry2Aa21, Cry2Aa22, Cry2Aa23, Cry2Aa23, Cry2Aa25, Cry2Ab1, Cry2Ab2, Cry2Ab3, Cry2Ab4, Cry2Ab5, Cry2Ab6, Cry2Ab7, Cry2Ab8, Cry2Ab9, Cry2Ab10, Cry2Ab11, Cry2Ab12, Cry2Ab13, Cry2Ab14, Cry2Ab15, Cry2Ab16, Cry2Ab17, Cry2Ab18, Cry2Ab19, Cry2Ab20, Cry2Ab21, Cry2Ab22, Cry2Ab23, Cry2Ab24, Cry2Ab25, Cry2Ab26, Cry2Ab27, Cry2Ab28, Cry2Ab29, Cry2Ab30, Cry2Ab31, Cry2Ab32, Cry2Ab33, Cry2Ab34, Cry2Ab35, Cry2Ab36, Cry2Ac1, Cry2Ac2, Cry2Ac3, Cry2Ac4, Cry2Ac5, Cry2Ac6, Cry2Ac7, Cry2Ac8, Cry2Ac9, Cry2Ac10, Cry2Ac11, Cry2Ac12, Cry2Ad1, Cry2Ad2, Cry2Ad3, Cry2Ad4, Cry2Ad5, Cry2Ae1, Cry2Af1, Cry2Af2, Cry2Ag1, Cry2Ah1, Cry2Ah2, Cry2Ah3, Cry2Ah4, Cry2Ah5, Cry2Ah6, Cry2Ai1, Cry2Aj1, Cry2Ak1, Cry2A11, Cry2Ba1, Cry2Ba2, Cry3Aa1, Cry3Aa2, Cry3Aa3, Cry3Aa4, Cry3Aa5, Cry3Aa6, Cry3Aa7, Cry3Aa8, Cry3Aa9, Cry3Aa10, Cry3Aa11, Cry3Aa12, Cry3Ba1, Cry3Ba2, Cry3Ba3, Cry3Bb1, Cry3Bb2, Cry3Bb3, Cry3Ca1, Cry4Aa1, Cry4Aa2, Cry4Aa3, Cry4Aa4, Cry4A-like, Cry4Ba1, Cry4Ba2, Cry4Ba3, Cry4Ba4, Cry4Ba5, Cry4Ba-like, Cry4Ca1, Cry4Ca2, Cry4Cb1, Cry4Cb2, Cry4Cb3, Cry4Cc1, Cry5Aa1, Cry5Ab1, Cry5Ac1, Cry5Ad1, Cry5Ba1, Cry5Ba2, Cry5Ba3, Cry5Ca1, Cry5Ca2, Cry5Da1, Cry5Da2, Cry5Ea1, Cry5Ea2, Cry6Aa1, Cry6Aa2, Cry6Aa3, Cry6Ba1, Cry7Aa1, Cry7Aa2, Cry7Ab1, Cry7Ab2, Cry7Ab3, Cry7Ab4, Cry7Ab5, Cry7Ab6, Cry7Ab7, Cry7Ab8, Cry7Ab9, Cry7Ac1, Cry7Ba1, Cry7Bb1, Cry7Ca1, Cry7Cb1, Cry7Da1, Cry7Da2, Cry7Da3, Cry7Ea1, Cry7Ea2, Cry7Ea3, Cry7Fa1, Cry7Fa2, Cry7Fb1, Cry7Fb2, Cry7Fb3, Cry7Ga1, Cry7Ga2, Cry7Gb1, Cry7Gc1, Cry7Gd1, Cry7Ha1, Cry7Ia1, Cry7Ja1, Cry7Ka1, Cry7Kb1, Cry7La1, Cry8Aa1, Cry8Ab1, Cry8Ac1, Cry8Ad1, Cry8Ba1, Cry8Bb1, Cry8Bc1, Cry8Ca1, Cry8Ca2, Cry8Ca3, Cry8Ca4, Cry8Ca5, Cry8Da1, Cry8Da2, Cry8Da3, Cry8db1, Cry8Ea1, Cry8Ea2, Cry8Ea3, Cry8Ea4, Cry8Ea5, Cry8Ea6, Cry8Fa1, Cry8Fa2, Cry8Fa3, Cry8Fa4, Cry8Ga1, Cry8Ga2, Cry8Ga3, Cry8Ha1, Cry8Hb1, Cry8Ia1, Cry8Ia2, Cry8Ia3, Cry8Ia4, Cry8Ib1, Cry8Ib2, Cry8Ib3, Cry8Ja1, Cry8Ka1, Cry8Ka2, Cry8Ka3, Cry8Kb1, Cry8Kb2, Cry8Kb3, Cry8La1, Cry8Ma1, Cry8Ma2, Cry8Ma3, Cry8Na1, Cry8Pa1, Cry8Pa2, Cry8Pa3, Cry8Qa1, Cry8Qa2, Cry8Ra1, Cry8Sa1, Cry8Ta1, Cry8-like, Cry8-like, Cry9Aa1, Cry9Aa2, Cry9Aa3, Cry9Aa4, Cry9Aa5, Cry9Aa, like, Cry9Ba1, Cry9Ba2, Cry9Bb1, Cry9Ca1, Cry9Ca2, Cry9Cb1, Cry9Da1, Cry9Da2, Cry9Da3, Cry9Da4, Cry9db1, Cry9Dc1, Cry9Ea1, Cry9Ea2, Cry9Ea3, Cry9Ea4, Cry9Ea5, Cry9Ea6, Cry9Ea7, Cry9Ea8, Cry9Ea9, Cry9Ea10, Cry9Ea11, Cry9Eb1, Cry9Eb2, Cry9Eb3, Cry9Ec1, Cry9Ed1, Cry9Ee1, Cry9Ee2, Cry9Fa1, Cry9Ga1, Cry9-like, Cry10Aa1, Cry10Aa2, Cry10Aa3, Cry10Aa4, Cry10A-like, Cry11Aa1, Cry11Aa2, Cry11Aa3, Cry11Aa4, Cry11Aa5, Cry11Aa-like, Cry11Ba1, Cry11Bb1, Cry11Bb2, Cry12Aa1, Cry13Aa1, Cry13Aa2, Cry14Aa1, Cry14Ab1, Cry15Aa1, Cry16Aa1, Cry17Aa1, Cry18Aa1, Cry18Ba1, Cry18Ca1, Cry19Aa1, Cry19Ba1, Cry19Ca1, Cry20Aa1, Cry20Ba1, Cry20Ba2, Cry20-like, Cry21Aa1, Cry21Aa2, Cry21Aa3, Cry21Ba1, Cry21Ca1, Cry21Ca2, Cry21Da1, Cry21Ea1, Cry21Fa1, Cry21Ga1, Cry21Ha1, Cry22Aa1, Cry22Aa2, Cry22Aa3, Cry22Ab1, Cry22Ab2, Cry22Ba1, Cry22Bb1, Cry23Aa1, Cry24Aa1, Cry24Ba1, Cry24Ca1, Cry24Da1, Cry25Aa1, Cry26Aa1, Cry27Aa1, Cry28Aa1, Cry28Aa2, Cry29Aa1, Cry29Ba1, Cry30Aa1, Cry30Ba1, Cry30Ca1, Cry30Ca2, Cry30Da1, Cry30db1, Cry30Ea1, Cry30Ea2, Cry30Ea3, Cry30Ea4, Cry30Fa1, Cry30Ga1, Cry30Ga2, Cry31Aa1, Cry31Aa2, Cry31Aa3, Cry31Aa4, Cry31Aa5, Cry31Aa6, Cry31Ab1, Cry31Ab2, Cry31Ac1, Cry31Ac2, Cry31Ad1, Cry31Ad2, Cry32Aa1, Cry32Aa2, Cry32Ab1, Cry32Ba1, Cry32Ca1, Cry32Cb1, Cry32Da1, Cry32Ea1, Cry32Ea2, Cry32Eb1, Cry32Fa1, Cry32Ga1, Cry32Ha1, Cry32Hb1, Cry32Ia1, Cry32Ja1, Cry32Ka1, Cry32La1, Cry32Ma1, Cry32Mb1, Cry32Na1, Cry32Oa1, Cry32Pa1, Cry32Qa1, Cry32Ra1, Cry32Sa1, Cry32Ta1, Cry32Ua1, Cry32Va1, Cry32Wa1, Cry32Wa2, Cry32Xa1, Cry32Ya1, Cry33Aa1, Cry34Aa1, Cry34Aa2, Cry34Aa3, Cry34Aa4, Cry34Ab1, Cry34Ac1, Cry34Ac2, Cry34Ac3, Cry34Ba1, Cry34Ba2, Cry34Ba3, Cry35Aa1, Cry35Aa2, Cry35Aa3, Cry35Aa4, Cry35Ab1, Cry35Ab2, Cry35Ab3, Cry35Ac1, Cry35Ba1, Cry35Ba2, Cry35Ba3, Cry36Aa1, Cry37Aa1, Cry38Aa1, Cry39Aa1, Cry40Aa1, Cry40Ba1, Cry40Ca1, Cry40Da1, Cry41Aa1, Cry41Ab1, Cry41Ba1, Cry41Ba2, Cry41Ca1, Cry42Aa1, Cry43Aa1, Cry43Aa2, Cry43Ba1, Cry43Ca1, Cry43Cb1, Cry43Cc1, Cry43-like, Cry44Aa1, Cry45Aa1, Cry45Ba1, Cry46Aa1, Cry46Aa2, Cry46Ab1, Cry47Aa1, Cry48Aa1, Cry48Aa2, Cry48Aa3, Cry48Ab1, Cry48Ab2, Cry49Aa1, Cry49Aa2, Cry49Aa3, Cry49Aa4, Cry49Ab1, Cry50Aa1, Cry50Ba1, Cry50Ba2, Cry51Aa1, Cry51Aa2, Cry52Aa1, Cry52Ba1, Cry52Ca1, Cry53Aa1, Cry53Ab1, Cry54Aa1, Cry54Aa2, Cry54Ab1, Cry54Ba1, Cry54Ba2, Cry55Aa1, Cry55Aa2, Cry55Aa3, Cry56Aa1, Cry56Aa2, Cry56Aa3, Cry56Aa4, Cry57Aa1, Cry57Ab1, Cry58Aa1, Cry59Ba1, Cry59Aa1, Cry60Aa1, Cry60Aa2, Cry60Aa3, Cry60Ba1, Cry60Ba2, Cry60Ba3, Cry61Aa1, Cry61Aa2, Cry61Aa3, Cry62Aa1, Cry63Aa1, Cry64Aa1, Cry64Ba1, Cry64Ca1, Cry65Aa1, Cry65Aa2, Cry66Aa1, Cry66Aa2, Cry67Aa1, Cry67Aa2, Cry68Aa1, Cry69Aa1, Cry69Aa2, Cry69Ab1, Cry70Aa1, Cry70Ba1, Cry70Bb1, Cry71Aa1, Cry72Aa1, Cry72Aa2, Cry73Aa1, Cry74Aa, Cry75Aa1, Cry75Aa2, Cry75Aa3, Cry76Aa1, Cry77Aa1, and/or Cry78Aa1.

[1227] In some embodiments, a combination or composition comprises one or more of CRIPs: A1-A68, that is combined with one or more Bt toxins, wherein said Bt toxin is a Cry toxin, a Cyt toxin, or a Vip toxin (e.g., any of the Cry, Cyt, or Vips as described herein).

[1228] In some embodiments, one or more of CRIPs: A1-A68 can be combined with one or more Cry proteins having an amino acid sequence as set forth in SEQ ID NOs: 412-461.

[1229] In some embodiments, a combination or composition comprises one or more of CRIPs: A1-A68 that is combined with one or more of the following Cyt proteins: Cyt1Aa1, Cyt1Aa2, Cyt1Aa3, Cyt1Aa4, Cyt1Aa5, Cyt1Aa6, Cyt1Aa7, Cyt1Aa8, Cyt1Aa-like, Cyt1Ab1, Cyt1Ba1, Cyt1Ca1, Cyt1Da1, Cyt1Da2, Cyt2Aa1, Cyt2Aa2, Cyt2Aa3, Cyt2Aa4, Cyt2Ba1, Cyt2Ba2, Cyt2Ba3, Cyt2Ba4, Cyt2Ba5, Cyt2Ba6, Cyt2Ba7, Cyt2Ba8, Cyt2Ba9, Cyt2Ba10, Cyt2Ba11, Cyt2Ba12, Cyt2Ba13, Cyt2Ba14, Cyt2Ba15, Cyt2Ba16, Cyt2Ba-like, Cyt2Bb1, Cyt2Bc1, Cyt2B-like, Cyt2Ca1, and/or Cyt3Aa1.

[1230] In some embodiments, a combination or composition comprises one or more of CRIPs: A1-A68, which is combined with one or more Cyt proteins having an amino acid sequence as set forth in SEQ ID NOs: 462-481.

[1231] In some embodiments, the present invention provides for a combination comprising one or more of CRIPs: A1-A68 and a Bacillus thuringiensis (Bt) toxin; wherein the Bt toxin is a secreted protein that is a vegetative insecticidal proteins (Vip), a secreted insecticidal protein (Sip), a Bin-like family protein, or an ETX_MTX2-family protein.

[1232] In some embodiments, the present invention provides for a combination comprising one or more of CRIPs: A1-A68 and a Bacillus thuringiensis (Bt) toxin; wherein the Bt toxin is a secreted protein that is a Vip.

[1233] In some embodiments, the present invention provides for a combination comprising one or more of CRIPs: A1-A68 and a Bacillus thuringiensis (Bt) toxin; wherein the Bt toxin is a Vip that is a Vip 1 family protein, Vip 2 family protein, Vip 3 family protein, or Vip 4 family protein.

[1234] In some embodiments, one or more of CRIPs: A1-A68 can be combined with one or more of the following Vip proteins: Vip1Aa1, Vip1Aa2, Vip1Aa3, Vip1Ab1, Vip1Ac1, Vip1Ad1, Vip1Ba1, Vip1Ba2, Vip1Bb1, Vip1Bb2, Vip1Bb3, Vip1Bc1, Vip1Ca1, Vip1Ca2, Vip1Da1, Vip2Aa1, Vip2Aa2, Vip2Aa3, Vip2Ab1, Vip2Ac1, Vip2Ac2, Vip2Ad1, Vip2Ae1, Vip2Ae2, Vip2Ae3, Vip2Af1, Vip2Af2, Vip2Ag1, Vip2Ag2, Vip2Ba1, Vip2Ba2, Vip2Bb1, Vip2Bb2, Vip2Bb3, Vip2Bb4, Vip3Aa1, Vip3Aa2, Vip3Aa3, Vip3Aa4, Vip3Aa5, Vip3Aa6, Vip3Aa7, Vip3Aa8, Vip3Aa9, Vip3Aa10, Vip3Aa11, Vip3Aa12, Vip3Aa13, Vip3Aa14, Vip3Aa15, Vip3Aa16, Vip3Aa17, Vip3Aa18, Vip3Aa19.0, Vip3Aa19, Vip3Aa20, Vip3Aa21, Vip3Aa22, Vip3Aa23, Vip3Aa24, Vip3Aa25, Vip3Aa26, Vip3Aa27, Vip3Aa28, Vip3Aa29, Vip3Aa30, Vip3Aa31, Vip3Aa32, Vip3Aa33, Vip3Aa34, Vip3Aa35, Vip3Aa36, Vip3Aa37, Vip3Aa38, Vip3Aa39, Vip3Aa40, Vip3Aa41, Vip3Aa42, Vip3Aa43, Vip3Aa44, Vip3Aa45, Vip3Aa46, Vip3Aa47, Vip3Aa48, Vip3Aa49, Vip3Aa50, Vip3Aa51, Vip3Aa52, Vip3Aa53, Vip3Aa54, Vip3Aa55, Vip3Aa56, Vip3Aa57, Vip3Aa58, Vip3Aa59, Vip3Aa60, Vip3Aa61, Vip3Aa62, Vip3Aa63, Vip3Aa64, Vip3Aa65, Vip3Aa66, Vip3Ab1, Vip3Ab2, Vip3Ac1, Vip3Ad1, Vip3Ad2, Vip3Ad3, Vip3Ad4, Vip3Ad5, Vip3Ad6, Vip3Ae1, Vip3Af1, Vip3Af2, Vip3Af3, Vip3Af4, Vip3Ag1, Vip3Ag2, Vip3Ag3, Vip3Ag4, Vip3Ag5, Vip3Ag6, Vip3Ag7, Vip3Ag8, Vip3Ag9, Vip3Ag10, Vip3Ag11, Vip3Ag12, Vip3Ag13, Vip3Ag14, Vip3Ag15, Vip3Ah1, Vip3Ah2, Vip3Ai1, Vip3Aj1, Vip3Aj2, Vip3Ba1, Vip3Ba2, Vip3Bb1, Vip3Bb2, Vip3Bb3, Vip3Bc, Vip3Ca1, Vip3Ca2, Vip3Ca3, Vip3Ca4, and/or Vip4Aa1.

[1235] In some embodiments, one or more of CRIPs: A1-A68 can be combined with one or more Vip proteins having an amino acid sequence as set forth in SEQ ID NOs: 482-587.

[1236] Any of the foregoing combinations or compositions comprising one or more of CRIPs: A1-A68 and one or more Bt peptides, can be applied concomitantly and/or sequentially, and either in the same or separate compositions. The ratios of CRIP to Bt peptide will depend on the insect pest to be targeted, and the need of the user.

[1237] In some embodiments, the Bt protein and the CRIP may be applied to (Bt protein)-resistant insects. The ratio of Bt to CRIP, on a dry weight basis, can be selected from at least about the following ratios: 10,000:1, 5,000:1, 1,000:1, 500:1, 250:1, 200:1, 100:1, 99:1, 95:5, 90:10, 85:15, 80:20, 75:25, 70:30, 65:35, 60:40, 55:45, 1:1, 45:55, 40:60, 35:65, 30:70, 25:75, 20:80, 15:85, 10:90, 5:95, 1:99, 1:100, 1:200, 1:250, 1:500, 1:1,000, 1:5,000, or 1:10,000, or any combination of any two of these values. The total concentration of Bt and CRIP in the composition is selected from the following percent concentrations: 0, 1, 5, 10, 15, 20, 25, 30, 35, 40, 45, 50, 55, 60, 65, 70, 75, 80, 85, 90, 95, 99 or 100%, or any range between any two of these values, and the remaining percentage of the composition is comprised of excipients.

[1238] In some embodiments, one or more CRIPs can be included in a formulation, for example, a formulation composed of a polar aprotic solvent, and or water, and or where the polar aprotic solvent is present in an amount of 1-99 wt %, the polar protic solvent is present in an amount of 1-99 wt %, and the water is present in an amount of 0-98 wt %. In some embodiments, the formulations include a CRIP, and another IA, for example, a Bt protein. In some embodiments, the Bt protein is contained within a commercially available product (e.g., DiPel®). The polar aprotic solvent formulations are especially effective when they contain MSO. MSO is a methylated seed oil and surfactant blend that uses methyl esters of soya oil in amounts of between about 80 and 85 percent petroleum oil with 15 to 20 percent surfactant.

[1239] In some embodiments, a combination or composition can comprise a Bacillus thuringiensis (Bt) protein and a CRIP, wherein the Bt peptide can be a MTX2 toxin, e.g., a MTX2 toxin isolated from Lysinibacillus sphaericus.

[1240] In some embodiments, a combination or composition can comprise a Bacillus thuringiensis (Bt) protein and a CRIP, wherein the Bt peptide can be a Bin-like toxin, e.g., a Bin-like toxin isolated from Lysinibacillus sphaericus.

[1241] In some embodiments, a combination or composition can comprise a Bacillus thuringiensis (Bt) protein and a CRIP, wherein the Bt peptide can be isolated from a Bacillus thuringiensis subspecies. For example, in some embodiments, the Bacillus thuringiensis subspecies can be one of the following subspecies: aizawai; aizawai/pacificus; alesti; amagiensis; andalousiensis; argentinensis; asturiensis; azorensis; balearica; berliner; bolivia; brasilensis; cameroun; canadensis; chanpaisis; chinensis; colmeri; coreanensis; dakota; darmstadiensis; dendrolimus; entomocidus; entomocidus/subtoxicus; finitimus; fukuokaensis; galechiae; galleriae; graciosensis; guiyangiensis; higo; huazhongensis; iberica; indiana; israelensis; israelensis/tochigiensis; japonensis; jegathesan; jinghongiensis; kenyae; kim; kumamtoensis; kurstaki; kyushuensis; leesis; londrina; malayensis; medellin; mexicanensis; mogi; monterrey; morrisoni; muju; navarrensis; neoleonensis; nigeriensis; novosibirsk, ostriniae; oswaldocruzi; pahangi; pakistani; palmanyolensis; pingluonsis; pirenaica; poloniensis; pondicheriensis; pulsiensis; rongseni; roskildiensis; san diego; seoulensis; shandongiensis; silo; sinensis; sooncheon; sotto; sotto/dendrolimus; subtoxicus; sumiyoshiensis; sylvestriensis; tenebrionis; thailandensis; thompsoni; thuringiensis; tochigiensis; toguchini; tohokuensis; tolworthi; toumanoffi; vazensis; wratislaviensis; wuhanensis; xiaguangiensis; yosoo; yunnanensis; zhaodongensis; str. Al Hakam; or konkukian.

[1242] In some embodiments, a combination or composition can comprise a Bacillus thuringiensis (Bt) protein and a CRIP, wherein the Bt peptide is isolated from a Bacillus thuringiensis var. selected from the following group: Bacillus thuringiensis var. aizawai; Bacillus thuringiensis var. aizawai/pacificus; Bacillus thuringiensis var. alesti; Bacillus thuringiensis var. amagiensis; Bacillus thuringiensis var. andalousiensis; Bacillus thuringiensis var. argentinensis; Bacillus thuringiensis var. asturiensis; Bacillus thuringiensis var. azorensis; Bacillus thuringiensis var. balearica; Bacillus thuringiensis var. berliner; Bacillus thuringiensis var. bolivia; Bacillus thuringiensis var. brasilensis; Bacillus thuringiensis var. cameroun; Bacillus thuringiensis var. canadensis; Bacillus thuringiensis var. chanpaisis; Bacillus thuringiensis var. chinensis; Bacillus thuringiensis var. colmeri; Bacillus thuringiensis var. coreanensis; Bacillus thuringiensis var. dakota; Bacillus thuringiensis var. darmstadiensis; Bacillus thuringiensis var. dendrolimus; Bacillus thuringiensis var. entomocidus; Bacillus thuringiensis var. entomocidus/subtoxicus; Bacillus thuringiensis var. finitimus; Bacillus thuringiensis var. fukuokaensis; Bacillus thuringiensis var. galechiae; Bacillus thuringiensis var. galleriae; Bacillus thuringiensis var. graciosensis; Bacillus thuringiensis var. guiyangiensis; Bacillus thuringiensis var. higo; Bacillus thuringiensis var. huazhongensis; Bacillus thuringiensis var. iberica; Bacillus thuringiensis var. indiana; Bacillus thuringiensis var. israelensis; Bacillus thuringiensis var. israelensis/tochigiensis; Bacillus thuringiensis var. japonensis; Bacillus thuringiensis var. jegathesan; Bacillus thuringiensis var. jinghongiensis; Bacillus thuringiensis var. kenyae; Bacillus thuringiensis var. kim; Bacillus thuringiensis var. kumamtoensis; Bacillus thuringiensis var. kunthalanags3; Bacillus thuringiensis var. kunthalaRX24; Bacillus thuringiensis var. kunthalaRX27; Bacillus thuringiensis var. kunthalaRX28; Bacillus thuringiensis var. kurstaki; Bacillus thuringiensis var. kyushuensis; Bacillus thuringiensis var. leesis; Bacillus thuringiensis var. londrina; Bacillus thuringiensis var. malayensis; Bacillus thuringiensis var. medellin; Bacillus thuringiensis var. mexicanensis; Bacillus thuringiensis var. mogi; Bacillus thuringiensis var. monterrey; Bacillus thuringiensis var. morrisoni; Bacillus thuringiensis var. muju; Bacillus thuringiensis var. navarrensis; Bacillus thuringiensis var. neoleonensis; Bacillus thuringiensis var. nigeriensis; Bacillus thuringiensis var. novosibirsk; Bacillus thuringiensis var. ostriniae; Bacillus thuringiensis var. oswaldocruzi; Bacillus thuringiensis var. pahangi; Bacillus thuringiensis var. pakistani; Bacillus thuringiensis var. palmanyolensis; Bacillus thuringiensis var. pingluonsis; Bacillus thuringiensis var. pirenaica; Bacillus thuringiensis var. poloniensis; Bacillus thuringiensis var. pondicheriensis; Bacillus thuringiensis var. pulsiensis; Bacillus thuringiensis var. rongseni; Bacillus thuringiensis var. roskildiensis; Bacillus thuringiensis var. san diego; Bacillus thuringiensis var. seoulensis; Bacillus thuringiensis var. shandongiensis; Bacillus thuringiensis var. silo; Bacillus thuringiensis var. sinensis; Bacillus thuringiensis var. sooncheon; Bacillus thuringiensis var. sotto; Bacillus thuringiensis var. sotto/dendrolimus; Bacillus thuringiensis var. subtoxicus; Bacillus thuringiensis var. sumiyoshiensis; Bacillus thuringiensis var. sylvestriensis; Bacillus thuringiensis var. tenebrionis; Bacillus thuringiensis var. thailandensis; Bacillus thuringiensis var. thompsoni; Bacillus thuringiensis var. thuringiensis; Bacillus thuringiensis var. tochigiensis; Bacillus thuringiensis var. toguchini; Bacillus thuringiensis var. tohokuensis; Bacillus thuringiensis var. tolworthi; Bacillus thuringiensis var. toumanoffi; Bacillus thuringiensis var. vazensis; Bacillus thuringiensis var. wratislaviensis; Bacillus thuringiensis var. wuhanensis; Bacillus thuringiensis var. xiaguangiensis; Bacillus thuringiensis var. yosoo; Bacillus thuringiensis var. yunnanensis; Bacillus thuringiensis var. zhaodongensis; Bacillus thuringiensis str. Al Hakam; Bacillus thuringiensis T01-328; Bacillus thuringiensis YBT-1518; or Bacillus thuringiensis var. konkukian.

[1243] In some embodiments, a combination or composition can comprise a Bacillus thuringiensis (Bt) protein and a CRIP, wherein the Bt peptide is isolated from a Bacillus thuringiensis serovar. For example, in some embodiments, a the Bt peptide can be a Bacillus thuringiensis serovar selected from the following group: Bacillus thuringiensis AKS-7; Bacillus thuringiensis Bt18247; Bacillus thuringiensis Bt18679; Bacillus thuringiensis Bt407; Bacillus thuringiensis DAR 81934; Bacillus thuringiensis DB27; Bacillus thuringiensis F14-1; Bacillus thuringiensis FC1; Bacillus thuringiensis FC10; Bacillus thuringiensis FC2; Bacillus thuringiensis FC6; Bacillus thuringiensis FC7; Bacillus thuringiensis FCB; Bacillus thuringiensis FC9; Bacillus thuringiensis HD-771; Bacillus thuringiensis HD-789; Bacillus thuringiensis HD1002; Bacillus thuringiensis IBL 200; Bacillus thuringiensis IBL 4222; Bacillus thuringiensis JM-Mgvxx-63; Bacillus thuringiensis LDC 391; Bacillus thuringiensis LM1212; Bacillus thuringiensis MC28; Bacillus thuringiensis Sbt003; Bacillus thuringiensis serovar aizawai; Bacillus thuringiensis serovar aizawai/pacificus; Bacillus thuringiensis serovar alesti; Bacillus thuringiensis serovar amagiensis; Bacillus thuringiensis serovar andalousiensis; Bacillus thuringiensis serovar argentinensis; Bacillus thuringiensis serovar asturiensis; Bacillus thuringiensis serovar azorensis; Bacillus thuringiensis serovar balearica; Bacillus thuringiensis serovar berliner; Bacillus thuringiensis serovar bolivia; Bacillus thuringiensis serovar brasilensis; Bacillus thuringiensis serovar cameroun; Bacillus thuringiensis serovar canadensis; Bacillus thuringiensis serovar chanpaisis; Bacillus thuringiensis serovar chinensis; Bacillus thuringiensis serovar colmeri; Bacillus thuringiensis serovar coreanensis; Bacillus thuringiensis serovar dakota; Bacillus thuringiensis serovar darmstadiensis; Bacillus thuringiensis serovar dendrolimus; Bacillus thuringiensis serovar entomocidus; Bacillus thuringiensis serovar entomocidus/subtoxicus; Bacillus thuringiensis serovar finitimus; Bacillus thuringiensis serovar fukuokaensis; Bacillus thuringiensis serovar galechiae; Bacillus thuringiensis serovar galleriae; Bacillus thuringiensis serovar graciosensis; Bacillus thuringiensis serovar guiyangiensis; Bacillus thuringiensis serovar higo; Bacillus thuringiensis serovar huazhongensis; Bacillus thuringiensis serovar iberica; Bacillus thuringiensis serovar indiana; Bacillus thuringiensis serovar israelensis; Bacillus thuringiensis serovar israelensis/tochigiensis; Bacillus thuringiensis serovar japonensis; Bacillus thuringiensis serovar jegathesan; Bacillus thuringiensis serovar jinghongiensis; Bacillus thuringiensis serovar kenyae; Bacillus thuringiensis serovar kim; Bacillus thuringiensis serovar kumamtoensis; Bacillus thuringiensis serovar kunthalanags3; Bacillus thuringiensis serovar kunthalaRX24; Bacillus thuringiensis serovar kunthalaRX27; Bacillus thuringiensis serovar kunthalaRX28; Bacillus thuringiensis serovar kurstaki; Bacillus thuringiensis serovar kyushuensis; Bacillus thuringiensis serovar leesis; Bacillus thuringiensis serovar londrina; Bacillus thuringiensis serovar malayensis; Bacillus thuringiensis serovar medellin; Bacillus thuringiensis serovar mexicanensis; Bacillus thuringiensis serovar mogi; Bacillus thuringiensis serovar monterrey; Bacillus thuringiensis serovar morrisoni; Bacillus thuringiensis serovar muju; Bacillus thuringiensis serovar navarrensis; Bacillus thuringiensis serovar neoleonensis; Bacillus thuringiensis serovar nigeriensis; Bacillus thuringiensis serovar novosibirsk, Bacillus thuringiensis serovar ostriniae; Bacillus thuringiensis serovar oswaldocruzi; Bacillus thuringiensis serovar pahangi; Bacillus thuringiensis serovar pakistani; Bacillus thuringiensis serovar palmanyolensis; Bacillus thuringiensis serovar pingluonsis; Bacillus thuringiensis serovar pirenaica; Bacillus thuringiensis serovar poloniensis; Bacillus thuringiensis serovar pondicheriensis; Bacillus thuringiensis serovar pulsiensis; Bacillus thuringiensis serovar rongseni; Bacillus thuringiensis serovar roskildiensis; Bacillus thuringiensis serovar san diego; Bacillus thuringiensis serovar seoulensis; Bacillus thuringiensis serovar shandongiensis; Bacillus thuringiensis serovar silo; Bacillus thuringiensis serovar sinensis; Bacillus thuringiensis serovar sooncheon; Bacillus thuringiensis serovar sotto; Bacillus thuringiensis serovar sotto/dendrolimus; Bacillus thuringiensis serovar subtoxicus; Bacillus thuringiensis serovar sumiyoshiensis; Bacillus thuringiensis serovar sylvestriensis; Bacillus thuringiensis serovar tenebrionis; Bacillus thuringiensis serovar thailandensis; Bacillus thuringiensis serovar thompsoni; Bacillus thuringiensis serovar thuringiensis; Bacillus thuringiensis serovar tochigiensis; Bacillus thuringiensis serovar toguchini; Bacillus thuringiensis serovar tohokuensis; Bacillus thuringiensis serovar tolworthi; Bacillus thuringiensis serovar toumanoffi; Bacillus thuringiensis serovar vazensis; Bacillus thuringiensis serovar wratislaviensis; Bacillus thuringiensis serovar wuhanensis; Bacillus thuringiensis serovar xiaguangiensis; Bacillus thuringiensis serovar yosoo; Bacillus thuringiensis serovar yunnanensis; Bacillus thuringiensis serovar zhaodongensis; Bacillus thuringiensis str. Al Hakam; Bacillus thuringiensis T01-328; Bacillus thuringiensis YBT-1518; and Bacillus thuringiensis serovar konkukian.

[1244] In some embodiments, a combination or composition can comprise a Bacillus thuringiensis (Bt) protein and a CRIP, wherein the Bt peptide is isolated from: Bacillus thuringiensis var. israelensis, Bacillus thuringiensis var. aizawai, Bacillus thuringiensis var. kurstaki, or Bacillus thuringiensis var. tenebrionensis.

[1245] In some embodiments, the present invention provides for a combination comprising one or more of CRIPs: A1-A68 and a Bacillus thuringiensis (Bt) toxin; wherein the combination results in an insecticidal effect; and wherein the Bt toxin is a Bacillus thuringiensis var. israelensis (Bti) toxin.

[1246] In some embodiments, the present invention provides for a combination comprising one or more of CRIPs: A1-A68 and a Bacillus thuringiensis (Bt) toxin; wherein the combination results in an insecticidal effect; and wherein the Bti toxin is a Bacillus thuringiensis ssp. israelensis Strain BMP 144 Bti toxin.

[1247] In some embodiments, the present invention provides for a combination comprising one or more of CRIPs: A1-A68 and a Bacillus thuringiensis (Bt) toxin; wherein the combination results in an insecticidal effect; and wherein the Bt toxin is a Bacillus thuringiensis var. kurstaki (Btk) toxin.

[1248] In some embodiments, the present invention provides for a combination comprising one or more of CRIPs: A1-A68 and a Bacillus thuringiensis (Bt) toxin; wherein the combination results in an insecticidal effect; and wherein the Btk toxin is Bacillus thuringiensis ssp. kurstaki strain EVB-113-19 Btk toxin.

[1249] In some embodiments, the present invention provides for a combination comprising one or more of CRIPs: A1-A68 and a Bacillus thuringiensis (Bt) toxin; wherein the combination results in an insecticidal effect; and wherein the Bt toxin is a Bacillus thuringiensis var. tenebrionis (Btt) toxin.

[1250] In some embodiments, the present invention provides for a combination comprising one or more of CRIPs: A1-A68 and a Bacillus thuringiensis (Bt) toxin; wherein the combination results in an insecticidal effect; and wherein the Btt toxin is a Bacillus thuringiensis ssp. tenebrionis strain NB-176 Btt toxin.

[1251] In some embodiments, the present invention provides for a combination comprising one or more of CRIPs: A1-A68 and a Bacillus thuringiensis (Bt) toxin; wherein the combination results in an insecticidal effect; and wherein the ratio of CRIP to Bt toxin is about 10,000:1, 5,000:1, 1,000:1, 500:1, 250:1, 200:1, 100:1, 99:1, 95:5, 90:10, 85:15, 80:20, 75:25, 70:30, 65:35, 60:40, 55:45, 1:1, 45:55, 40:60, 35:65, 30:70, 25:75, 20:80, 15:85, 10:90, 5:95, 1:99, 1:100, 1:200, 1:250, 1:500, 1:1,000, 1:5,000, or 1:10,000.

[1252] In some embodiments, the present invention provides for a combination comprising one or more of CRIPs: A1-A68 and a Bacillus thuringiensis (Bt) toxin; wherein the combination results in an insecticidal effect; and wherein the ratio of Bt toxin to CRIP is from about 1:1 to about 1:200.

[1253] In some embodiments, the present invention provides for a combination comprising one or more of CRIPs: A1-A68 and a Bacillus thuringiensis (Bt) toxin; wherein the combination results in an insecticidal effect; and wherein the ratio of Bt toxin to CRIP is about 1:115.

[1254] In some embodiments, the present invention provides for a combination comprising at least one CRIP and at least one IA, wherein the CRIP is a TVP, and the IA is a Bacillus thuringiensis (Bt) toxin; wherein the combination results in an insecticidal effect; and wherein the TVP comprises an amino acid sequence that is at least 90% identical to the amino acid sequence according to Formula (I): E-P-D-E-I-C-R-X₁-X₂-M-X₃-N-K-E-F-T-Y-X₄-S-N-V-C-N-N-C-G-D-Q-V-A-A-C-E-A-E-C-F-X₅-N-D-V-Y-Z₁-A-C-H-E-A-Q-X₆-X₇, wherein the polypeptide comprises at least one amino acid substitution relative to the wild-type sequence of U1-agatoxin-Ta1b as set forth in SEQ ID NO:1, and wherein X₁ is A, S, or N; X₂ is R, Q, or N; X₃ is T or P; X₄ is K or A; X₅ is R or A; Z₁ is T or A; X₆ is K or absent; and X₇ is G or absent; and wherein if Z₁ is T, then the TVP is glycosylated.

[1255] In some embodiments any of the combinations of a CRIP as described herein, and a Bt toxin as described herein, can further comprise an excipient.

[1256] Any of the foregoing combinations or compositions comprising one or more of CRIPs: A1-A68, and a Bt toxin, can be applied concomitantly and/or sequentially, and either in the same or separate compositions. The ratios of a CRIP to an IA, i.e., one or more chemical substances, molecules, nucleotides, polynucleotides, peptides, polypeptides, proteins, toxins, toxicants, poisons, insecticides, pesticides, organic compounds, inorganic compounds, prokaryote organisms, or eukaryote organisms, and the agents produced by said prokaryote or eukaryote organisms, will depend on the insect pest to be targeted, and the need of the user.

[1257] Furthermore, any of the foregoing combinations or compositions comprising a CRIP and a Bt toxin, can be can be applied to the crop area or plant to be treated, simultaneously or in succession, with other compounds. For example, in some embodiments, these compounds can be fertilizers, weed killers, cryoprotectants, surfactants, detergents, pesticidal soaps, dormant oils, polymers, and/or time-release or biodegradable carrier formulations that permit long-term dosing of a target area following a single application of the formulation. The other compounds can also be selective herbicides, chemical insecticides, virucides, microbicides, amoebicides, pesticides, fungicides, bacteriocides, nematocides, molluscicides or combinations of several of these preparations, if desired, together with further agriculturally acceptable carriers, surfactants or application-promoting adjuvants customarily employed in the art of formulation. In some embodiments, suitable carriers and adjuvants can be solid or liquid, and correspond to the substances ordinarily employed in formulation technology, e.g. natural or regenerated mineral substances, solvents, dispersants, wetting agents, tackifiers, binders or fertilizers. Likewise, any of the foregoing combinations, compositions, or formulations may be prepared into edible “baits” or fashioned into pest “traps” to permit feeding or ingestion by a target pest of the pesticidal formulation.

[1258] Methods of Using the Present Invention

[1259] Methods for Protecting Plants, Plant Parts, and Seeds

[1260] In some embodiments, the present disclosure comprises a method for controlling an invertebrate pest in agronomic and/or nonagronomic applications, comprising contacting the invertebrate pest or its environment, a solid surface, including a plant surface or part thereof, with a biologically effective amount of a combination of one or more CRIPs (e.g., one or more of CRIPs: A1-A68 in Table A) and one or more IAs (e.g., one or more of IAs: B1-B479 in Table B).

[1261] In some embodiments, the present disclosure comprises a method for controlling an invertebrate pest in agronomic and/or nonagronomic applications, comprising contacting the invertebrate pest or its environment, a solid surface, including a plant surface or part thereof, with a biologically effective amount of a composition or a combination of one or more CRIPs (e.g., one or more of CRIPs: A1-A68 in Table A) and one or more IAs (e.g., one or more of IAs: B1-B479 in Table B). Examples of suitable compositions comprising one or more CRIPs (e.g., one or more of CRIPs: A1-A68 in Table A) and one or more IAs (e.g., one or more of IAs: B1-B479 in Table B) include a liquid solution, an emulsion, a powder, a granule, a nanoparticle, a microparticle, or a combination of the above formulated into a composition wherein either one or more CRIPs (e.g., one or more of CRIPs: A1-A68 in Table A) is present on, or in the same composition as the one or more IAs (e.g., one or more of IAs: B1-B479 in Table B) (e.g., a part of a granular composition, or on granules separate.

[1262] In some embodiments, to achieve contact with a compound, combination, or composition of the invention to protect a field crop from invertebrate pests, the compound or composition is typically applied to the seed of the crop before planting, to the foliage (e.g., leaves, stems, flowers, fruits) of crop plants, or to the soil or other growth medium before or after the crop is planted.

[1263] One embodiment of a method of contact is by spraying. Alternatively, a granular composition comprising a one or more CRIPs (e.g., one or more of CRIPs: A1-A68 in Table A) and one or more IAs (e.g., one or more of IAs: B1-B479 in Table B) of the invention can be applied to the plant foliage or the soil. Compounds of this invention can also be effectively delivered through plant uptake by contacting the plant with a composition comprising a compound of this invention applied as a soil drench of a liquid formulation, a granular formulation to the soil, a nursery box treatment or a dip of transplants. Of note is a composition of the present disclosure in the form of a soil drench liquid formulation. Also of note is a method for controlling an invertebrate pest comprising contacting the invertebrate pest or its environment with a biologically effective amount of a one or more CRIPs (e.g., one or more of CRIPs: A1-A68 in Table A) and one or more IAs (e.g., one or more of IAs: B1-B479 in Table B), or with a composition comprising a biologically effective amount of a one or more CRIPs (e.g., one or more of CRIPs: A1-A68 in Table A) and one or more IAs (e.g., one or more of IAs: B1-B479 in Table B). Of further note, in some illustrative embodiments, the illustrative method includes wherein the environment is soil and the composition is applied to the soil as a soil drench formulation. Of further note is that a one or more CRIPs (e.g., one or more of CRIPs: A1-A68 in Table A) and one or more IAs (e.g., one or more of IAs: B1-B479 in Table B), is also effective by localized application to the locus of infestation. Other methods of contact include application of a compound or a composition of the invention by direct and residual sprays, aerial sprays, gels, seed coatings, microencapsulations, systemic uptake, baits, ear tags, boluses, foggers, fumigants, aerosols, dusts and many others. One embodiment of a method of contact is a dimensionally stable fertilizer granule, stick or tablet comprising a compound or composition of the invention. The compounds of this invention can also be impregnated into materials for fabricating invertebrate control devices (e.g., insect netting, application onto clothing, application into candle formulations and the like).

[1264] In some embodiments, a combination comprising one or more CRIPs (e.g., one or more of CRIPs: A1-A68 in Table A) and one or more IAs (e.g., one or more of IAs: B1-B479 in Table B) is also useful in seed treatments for protecting seeds from invertebrate pests. In the context of the present disclosure and claims, treating a seed means contacting the seed with a biologically effective amount of a combination comprising one or more CRIPs (e.g., one or more of CRIPs: A1-A68 in Table A) and one or more IAs (e.g., one or more of IAs: B1-B479 in Table B), which is typically formulated as a composition of the invention. This seed treatment protects the seed from invertebrate soil pests and generally can also protect roots and other plant parts in contact with the soil of the seedling developing from the germinating seed. The seed treatment may also provide protection of foliage by translocation of the combination comprising one or more CRIPs (e.g., one or more of CRIPs: A1-A68 in Table A) and one or more IAs (e.g., one or more of IAs: B1-B479 in Table B) within the developing plant. Seed treatments can be applied to all types of seeds, including those from which plants genetically transformed to express specialized traits will germinate. In addition, a combination comprising one or more CRIPs (e.g., one or more of CRIPs: A1-A68 in Table A) and one or more IAs (e.g., one or more of IAs: B1-B479 in Table B) can be transformed into a plant or part thereof, for example a plant cell, or plant seed, that is already transformed with proteins toxic to invertebrate pests, such as Bacillus thuringiensis toxins or protein crystals or those expressing herbicide resistance such as glyphosate acetyltransferase, which provides resistance to glyphosate. Representative examples include those expressing proteins toxic to invertebrate pests, such as Bacillus thuringiensis toxins and/or protein crystals, or those expressing herbicide resistance such as glyphosate acetyltransferase, which provides resistance to glyphosate.

[1265] One method of seed treatment is by spraying or dusting the seed with a combination comprising one or more CRIPs (e.g., one or more of CRIPs: A1-A68 in Table A) and one or more IAs (e.g., one or more of IAs: B1-B479 in Table B) (i.e. as a formulated composition or a combination) before sowing the seeds. Compositions formulated for seed treatment generally comprise a film former or adhesive agent. Therefore, typically, a seed coating composition of the present disclosure comprises a biologically effective amount of a combination comprising one or more CRIPs (e.g., one or more of CRIPs: A1-A68 in Table A) and one or more IAs (e.g., one or more of IAs: B1-B479 in Table B), and a film former or adhesive agent. Seed can be coated by spraying a flowable suspension concentrate directly into a tumbling bed of seeds and then drying the seeds. Alternatively, other formulation types such as wetted powders, solutions, suspoemulsions, emulsifiable concentrates and emulsions in water can be sprayed on the seed. This process is particularly useful for applying film coatings on seeds. Various coating machines and processes are available to one skilled in the art. Suitable processes include those listed in P. Kosters et al., Seed Treatment: Progress and Prospects, 1994 BCPC Monograph No. 57, and references listed therein, the disclosures of which are incorporated herein by reference in their entireties.

[1266] The treated seed typically comprises a combination comprising one or more CRIPs (e.g., one or more of CRIPs: A1-A68 in Table A) and one or more IAs (e.g., one or more of IAs: B1-B479 in Table B) in an amount ranging from about 0.01 g to 1 kg per 100 kg of seed (i.e. from about 0.00001 to 1% by weight of the seed before treatment). A flowable suspension formulated for seed treatment typically comprises from about 0.5 to about 70% of the active ingredient, from about 0.5 to about 30% of a film-forming adhesive, from about 0.5 to about 20% of a dispersing agent, from 0 to about 5% of a thickener, from 0 to about 5% of a pigment and/or dye, from 0 to about 2% of an antifoaming agent, from 0 to about 1% of a preservative, and from 0 to about 75% of a volatile liquid diluent.

[1267] Methods of Using Combinations and Compositions

[1268] In some embodiments, the present invention provides a method of using a combination comprising one or more CRIPs (e.g., one or more of CRIPs: A1-A68 in Table A) and one or more IAs (e.g., one or more of IAs: B1-B479 in Table B) wherein the combination results in an insecticidal effect; to control insects, said method comprising, providing a combination comprising one or more CRIPs (e.g., one or more of CRIPs: A1-A68 in Table A) and one or more IAs (e.g., one or more of IAs: B1-B479 in Table B); and then applying said combination to the locus of an insect.

[1269] In some embodiments, the present invention provides a method of using a combination comprising one or more CRIPs (e.g., one or more of CRIPs: A1-A68 in Table A) and one or more IAs (e.g., one or more of IAs: B1-B479 in Table B); and wherein the combination results in an insecticidal effect; to control insects, wherein the insects are selected from the group consisting of: Achema Sphinx Moth (Hornworm) (Eumorpha achemon); Alfalfa Caterpillar (Colias eurytheme); Almond Moth (Caudra cautella); Amorbia Moth (Amorbia humerosana); Armyworm (Spodoptera spp., e.g. exigua, frugiperda, Pseudaletia unipuncta); Artichoke Plume Moth (Platyptilia carduidactyla); Azalea Caterpillar (Datana major); Bagworm (Thyridopteryx); ephemeraeformis); Banana Moth (Hypercompe scribonia); Banana Skipper (Erionota thrax); Blackheaded Budworm (Acleris gloverana); California Oakworm (Phryganidia californica); Spring Cankerworm (Paleacrita merriccata); Cherry Fruitworm (Grapholita packardi); China Mark Moth (Nymphula stagnata); Citrus Cutworm (Xylomyges curialis); Codling Moth (Cydia pomonella); Cranberry Fruitworm (Acrobasis vaccinii); Cross-striped Cabbageworm (Evergestis rimosalis); Cutworm (Noctuid species, Agrotis ipsilon); Douglas Fir Tussock Moth (Orgyia pseudotsugata); Ello Moth (Hornworm) (Erinnyis ello); Elm Spanworm (Ennomos subsignaria); European Grapevine Moth (Lobesia botrana); European Skipper (Thymelicus lineola (Essex Skipper); Fall Webworm (Melissopus latiferreanus; Filbert Leafroller (Archips rosanus; Fruittree Leafroller (Archips argyrospilia; Grape Berry Moth (Paralobesia viteana; Grape Leafroller (Platynota stultana; Grapeleaf Skeletonizer (Harrisina americana (ground only); Green Cloverworm (Plathypena scabra; Greenstriped Mapleworm (Dryocampa rubicunda; Gummosos-Batrachedra; Comosae (Hodges); Gypsy Moth (Lymantria dispar); Hemlock Looper (Lambdina fiscellaria); Hornworm (Manduca spp.); Imported Cabbageworm (Pieris rapae); Io Moth (Automeris io); Jack Pine Budworm (Choristoneura pinus); Light Brown Apple Moth (Epiphyas postvittana); Melonworm (Diaphania hyalinata); Mimosa Webworm (Homadaula anisocentra); Obliquebanded Leafroller (Choristoneura rosaceana); Oleander Moth (Syntomeida epilais); Omnivorous Leafroller (Playnota stultana); Omnivorous Looper (Sabulodes aegrotata); Orangedog (Papilio cresphontes); Orange Tortrix (Argyrotaenia citrana); Oriental Fruit Moth (Grapholita molesta); Peach Twig Borer (Anarsia lineatella); Pine Butterfly (Neophasia menapia); Podworm (Heliocoverpa zea); Redbanded Leafroller (Argyrotaenia velutinana); Redhumped Caterpillar (Schizura concinna); Rindworm Complex (Various Leps.); Saddleback Caterpillar (Sibine stimulea); Saddle Prominent Caterpillar Heterocampa guttivitta); Saltmarsh Caterpillar (Estigmene acrea); Sod Webworm (Crambus spp.); Spanworm (Ennomos subsignaria); Fall Cankerworm (Alsophila pometaria); Spruce Budworm (Choristoneura fumiferana); Tent Caterpillar (Various Lasiocampidae); Thecla-Thecla Basilides (Geyr) Thecla basilides); Tobacco Hornworm (Manduca sexta); Tobacco Moth (Ephestia elutella); Tufted Apple Budmoth (Platynota idaeusalis); Twig Borer (Anarsia lineatella); Variegated Cutworm (Peridroma saucia); Variegated Leafroller (Platynota flavedana); Velvetbean Caterpillar (Anticarsia gemmatalis); Walnut Caterpillar (Datana integerrima); Webworm (Hyphantria cunea); Western Tussock Moth (Orgyia vetusta); Southern Cornstalk Borer (Diatraea crambidoides); Corn Earworm; Sweet potato weevil; Pepper weevil; Citrus root weevil; Strawberry root weevil; Pecan weevil; Filbert weevil; Ricewater weevil; Alfalfa weevil; Clover weevil; Tea shot-hole borer; Root weevil; Sugarcane beetle; Coffee berry borer; Annual blue grass weevil (Listronotus maculicollis); Asiatic garden beetle (Maladera castanea); European chafer (Rhizotroqus majalis); Green June beetle (Cotinis nitida); Japanese beetle (Popillia japonica); May or June beetle (Phyllophaga sp.); Northern masked chafer (Cyclocephala borealis); Oriental beetle (Anomala orientalis); Southern masked chafer (Cyclocephala lurida); Billbug (Curculionoidea); Aedes aegypti; Busseola fusca; Chilo suppressalis; Culex pipiens; Culex quinquefasciatus; Diabrotica virgifera; Diatraea saccharalis; Helicoverpa armigera; Helicoverpa zea; Heliothis virescens; Leptinotarsa decemlineata; Ostrinia furnacalis; Ostrinia nubilalis; Pectinophora gossypiella; Plodia interpunctella; Plutella xylostella; Pseudoplusia includens; Spodoptera exigua; Spodoptera frugiperda; Spodoptera littoralis; Trichoplusia ni; and Xanthogaleruca luteola.

[1270] In some embodiments, the present invention provides a method of using a combination comprising one or more CRIPs (e.g., one or more of CRIPs: A1-A68 in Table A) and one or more IAs (e.g., one or more of IAs: B1-B479 in Table B); and wherein the combination results in an insecticidal effect; to control Bacillus thuringiensis-toxin-resistant insects comprising, providing a combination comprising one or more CRIPs (e.g., one or more of CRIPs: A1-A68 in Table A) and one or more IAs (e.g., one or more of IAs: B1-B479 in Table B); and then applying said combination to the locus of an insect.

[1271] In some embodiments, the present invention provides a method of using a combination comprising one or more CRIPs (e.g., one or more of CRIPs: A1-A68 in Table A) and one or more IAs (e.g., one or more of IAs: B1-B479 in Table B) wherein the combination results in an insecticidal effect; to control Bacillus thuringiensis-toxin-resistant insects, wherein the Bacillus thuringiensis-toxin-resistant insects are selected from the group consisting of: Aedes aegypti; Busseola fusca; Chilo suppressalis; Culex pipiens; Culex quinquefasciatus; Diabrotica virgifera; Diatraea saccharalis; Helicoverpa armigera; Helicoverpa zea; Heliothis virescens; Leptinotarsa decemlineata; Ostrinia furnacalis; Ostrinia nubilalis; Pectinophora gossypiella; Plodia interpunctella; Plutella xylostella; Pseudoplusia includens; Spodoptera exigua; Spodoptera frugiperda; Spodoptera littoralis; Trichoplusia ni; and Xanthogaleruca luteola.

[1272] In some embodiments, the present invention provides a method of combating, controlling, or inhibiting a pest comprising, applying a pesticidally effective amount of a combination comprising one or more CRIPs (e.g., one or more of CRIPs: A1-A68 in Table A) and one or more IAs (e.g., one or more of IAs: B1-B479 in Table B) wherein the combination results in an insecticidal effect; to the locus of the pest, or to a plant or animal susceptible to an attack by the pest; wherein the combination of each insecticidal peptide results in an insecticidal effect.

[1273] In some embodiments, the present invention provides a method of combating, controlling, or inhibiting a pest comprising, applying a pesticidally effective amount of a combination comprising one or more CRIPs (e.g., one or more of CRIPs: A1-A68 in Table A) and one or more IAs (e.g., one or more of IAs: B1-B479 in Table B) to the locus of the pest, or to a plant or animal susceptible to an attack by the pest; wherein the combination of each insecticidal peptide results in an insecticidal effect; wherein the pest is selected from the group consisting of: Achema Sphinx Moth (Hornworm) (Eumorpha achemon); Alfalfa Caterpillar (Colias eurytheme); Almond Moth (Caudra cautella); Amorbia Moth (Amorbia humerosana); Armyworm (Spodoptera spp., e.g. exigua, frugiperda, littoralis, Pseudaletia unipuncta); Artichoke Plume Moth (Platyptilia carduidactyla); Azalea Caterpillar (Datana major); Bagworm (Thyridopteryx); ephemeraeformis); Banana Moth (Hypercompe scribonia); Banana Skipper (Erionota thrax); Blackheaded Budworm (Acleris gloverana); California Oakworm (Phryganidia californica); Spring Cankerworm (Paleacrita merriccata); Cherry Fruitworm (Grapholita packardi); China Mark Moth (Nymphula stagnata); Citrus Cutworm (Xylomyges curialis); Codling Moth (Cydia pomonella); Cranberry Fruitworm (Acrobasis vaccinii); Cross-striped Cabbageworm (Evergestis rimosalis); Cutworm (Noctuid species, Agrotis ipsilon); Douglas Fir Tussock Moth (Orgyia pseudotsugata); Ello Moth (Hornworm) (Erinnyis ello); Elm Spanworm (Ennomos subsignaria); European Grapevine Moth (Lobesia botrana); European Skipper (Thymelicus lineola (Essex Skipper); Fall Webworm (Melissopus latiferreanus; Filbert Leafroller (Archips rosanus; Fruittree Leafroller (Archips argyrospilia; Grape Berry Moth (Paralobesia viteana; Grape Leafroller (Platynota stultana; Grapeleaf Skeletonizer (Harrisina americana (ground only); Green Cloverworm (Plathypena scabra; Greenstriped Mapleworm (Dryocampa rubicunda; Gummosos-Batrachedra; Comosae (Hodges); Gypsy Moth (Lymantria dispar); Hemlock Looper (Lambdina fiscellaria); Hornworm (Manduca spp.); Imported Cabbageworm (Pieris rapae); Io Moth (Automeris io); Jack Pine Budworm (Choristoneura pinus); Light Brown Apple Moth (Epiphyas postvittana); Melonworm (Diaphania hyalinata); Mimosa Webworm (Homadaula anisocentra); Obliquebanded Leafroller (Choristoneura rosaceana); Oleander Moth (Syntomeida epilais); Omnivorous Leafroller (Playnota stultana); Omnivorous Looper (Sabulodes aegrotata); Orangedog (Papilio cresphontes); Orange Tortrix (Argyrotaenia citrana); Oriental Fruit Moth (Grapholita molesta); Peach Twig Borer (Anarsia lineatella); Pine Butterfly (Neophasia menapia); Podworm (Heliocoverpa zea); Redbanded Leafroller (Argyrotaenia velutinana); Redhumped Caterpillar (Schizura concinna); Rindworm Complex (Various Leps.); Saddleback Caterpillar (Sibine stimulea); Saddle Prominent Caterpillar Heterocampa guttivitta); Saltmarsh Caterpillar (Estigmene acrea); Sod Webworm (Crambus spp.); Spanworm (Ennomos subsignaria); Fall Cankerworm (Alsophila pometaria); Spruce Budworm (Choristoneura fumiferana); Tent Caterpillar (Various Lasiocampidae); Thecla-Thecla Basilides (Geyr) Thecla basilides); Tobacco Hornworm (Manduca sexta); Tobacco Moth (Ephestia elutella); Tufted Apple Budmoth (Platynota idaeusalis); Twig Borer (Anarsia lineatella); Variegated Cutworm (Peridroma saucia); Variegated Leafroller (Platynota flavedana); Velvetbean Caterpillar (Anticarsia gemmatalis); Walnut Caterpillar (Datana integerrima); Webworm (Hyphantria cunea); Western Tussock Moth (Orgyia vetusta); Southern Cornstalk Borer (Diatraea crambidoides); Corn Earworm; Sweet potato weevil; Pepper weevil; Citrus root weevil; Strawberry root weevil; Pecan weevil; Filbert weevil; Ricewater weevil; Alfalfa weevil; Clover weevil; Tea shot-hole borer; Root weevil; Sugarcane beetle; Coffee berry borer; Annual blue grass weevil (Listronotus maculicollis); Asiatic garden beetle (Maladera castanea); European chafer (Rhizotroqus majalis); Green June beetle (Cotinis nitida); Japanese beetle (Popillia japonica); May or June beetle (Phyllophaga sp.); Northern masked chafer (Cyclocephala borealis); Oriental beetle (Anomala orientalis); Southern masked chafer (Cyclocephala lurida); Billbug (Curculionoidea); Aedes aegypti; Busseola fusca; Chilo suppressalis; Culex pipiens; Culex quinquefasciatus; Diabrotica virgifera; Diatraea saccharalis; Helicoverpa armigera; Helicoverpa zea; Heliothis virescens; Leptinotarsa decemlineata; Ostrinia furnacalis; Ostrinia nubilalis; Pectinophora gossypiella; Plodia interpunctella; Plutella xylostella; Pseudoplusia includens; Spodoptera exigua; Spodoptera frugiperda; Spodoptera littoralis; Trichoplusia ni; and Xanthogaleruca luteola.

[1274] In some embodiments, the present invention provides a method of combating, controlling, or inhibiting a pest comprising, applying a pesticidally effective amount of a combination comprising one or more CRIPs (e.g., one or more of CRIPs: A1-A68 in Table A) and one or more IAs (e.g., one or more of IAs: B1-B479 in Table B) to the locus of the pest, or to a plant or animal susceptible to an attack by the pest; wherein the combination of each insecticidal peptide results in an insecticidal effect; wherein the pest is selected from the group consisting of: Aedes aegypti; Busseola fusca; Chilo suppressalis; Culex pipiens; Culex quinquefasciatus; Diabrotica virgifera; Diatraea saccharalis; Helicoverpa armigera; Helicoverpa zea; Heliothis virescens; Leptinotarsa decemlineata; Ostrinia furnacalis; Ostrinia nubilalis; Pectinophora gossypiella; Plodia interpunctella; Plutella xylostella; Pseudoplusia includens; Spodoptera exigua; Spodoptera frugiperda; Spodoptera littoralis; Trichoplusia ni; and Xanthogaleruca luteola.

[1275] Combinations: Exemplary Combination of Bt Toxins and WT-Ta1b

[1276] In some embodiments, a combination or composition comprises, consists essentially of, or consists of: a U1-agatoxin-Ta1b peptide having an amino acid sequence according to the amino acid sequence set forth in SEQ ID NO: 1, and a bacterial toxin, wherein the bacterial toxin is a Bacillus thuringiensis (Bt) toxin.

[1277] In some embodiments, a combination or composition comprises, consists essentially of, or consists of: a U1-agatoxin-Ta1b peptide having an amino acid sequence according to the amino acid sequence set forth in SEQ ID NO: 1, and a Bt toxin, wherein the Bt toxin is one or more fermentation solids, spores, or toxins isolated from the group consisting of: Bacillus thuringiensis var. kurstaki (Btk); Bacillus thuringiensis var. tenebrionis (Btt); Bacillus thuringiensis var. israelensis (Bti); Bacillus thuringiensis var. aizawai; Bacillus thuringiensis var. aizawai/pacificus; Bacillus thuringiensis var. alesti; Bacillus thuringiensis var. amagiensis; Bacillus thuringiensis var. andalousiensis; Bacillus thuringiensis var. argentinensis; Bacillus thuringiensis var. asturiensis; Bacillus thuringiensis var. azorensis; Bacillus thuringiensis var. balearica; Bacillus thuringiensis var. berliner; Bacillus thuringiensis var. bolivia; Bacillus thuringiensis var. brasilensis; Bacillus thuringiensis var. cameroun; Bacillus thuringiensis var. canadensis; Bacillus thuringiensis var. chanpaisis; Bacillus thuringiensis var. chinensis; Bacillus thuringiensis var. colmeri; Bacillus thuringiensis var. coreanensis; Bacillus thuringiensis var. dakota; Bacillus thuringiensis var. darmstadiensis; Bacillus thuringiensis var. dendrolimus; Bacillus thuringiensis var. entomocidus; Bacillus thuringiensis var. entomocidus/subtoxicus; Bacillus thuringiensis var. finitimus; Bacillus thuringiensis var. fukuokaensis; Bacillus thuringiensis var. galechiae; Bacillus thuringiensis var. galleriae; Bacillus thuringiensis var. graciosensis; Bacillus thuringiensis var. guiyangiensis; Bacillus thuringiensis var. higo; Bacillus thuringiensis var. huazhongensis; Bacillus thuringiensis var. iberica; Bacillus thuringiensis var. indiana; Bacillus thuringiensis var. israelensis/tochigiensis; Bacillus thuringiensis var. japonensis; Bacillus thuringiensis var. jegathesan; Bacillus thuringiensis var. jinghongiensis; Bacillus thuringiensis var. kenyae; Bacillus thuringiensis var. kim; Bacillus thuringiensis var. kumamtoensis; Bacillus thuringiensis var. kunthalanags3; Bacillus thuringiensis var. kunthalaRX24; Bacillus thuringiensis var. kunthalaRX27; Bacillus thuringiensis var. kunthalaRX28; Bacillus thuringiensis var. kyushuensis; Bacillus thuringiensis var. leesis; Bacillus thuringiensis var. londrina; Bacillus thuringiensis var. malayensis; Bacillus thuringiensis var. medellin; Bacillus thuringiensis var. mexicanensis; Bacillus thuringiensis var. mogi; Bacillus thuringiensis var. monterrey; Bacillus thuringiensis var. morrisoni; Bacillus thuringiensis var. muju; Bacillus thuringiensis var. navarrensis; Bacillus thuringiensis var. neoleonensis; Bacillus thuringiensis var. nigeriensis; Bacillus thuringiensis var. novosibirsk; Bacillus thuringiensis var. ostriniae; Bacillus thuringiensis var. oswaldocruzi; Bacillus thuringiensis var. pahangi; Bacillus thuringiensis var. pakistani; Bacillus thuringiensis var. palmanyolensis; Bacillus thuringiensis var. pingluonsis; Bacillus thuringiensis var. pirenaica; Bacillus thuringiensis var. poloniensis; Bacillus thuringiensis var. pondicheriensis; Bacillus thuringiensis var. pulsiensis; Bacillus thuringiensis var. rongseni; Bacillus thuringiensis var. roskildiensis; Bacillus thuringiensis var. san diego; Bacillus thuringiensis var. seoulensis; Bacillus thuringiensis var. shandongiensis; Bacillus thuringiensis var. silo; Bacillus thuringiensis var. sinensis; Bacillus thuringiensis var. sooncheon; Bacillus thuringiensis var. sotto; Bacillus thuringiensis var. sotto/dendrolimus; Bacillus thuringiensis var. subtoxicus; Bacillus thuringiensis var. sumiyoshiensis; Bacillus thuringiensis var. sylvestriensis; Bacillus thuringiensis var. thailandensis; Bacillus thuringiensis var. thompsoni; Bacillus thuringiensis var. thuringiensis; Bacillus thuringiensis var. tochigiensis; Bacillus thuringiensis var. toguchini; Bacillus thuringiensis var. tohokuensis; Bacillus thuringiensis var. tolworthi; Bacillus thuringiensis var. toumanoffi; Bacillus thuringiensis var. vazensis; Bacillus thuringiensis var. wratislaviensis; Bacillus thuringiensis var. wuhanensis; Bacillus thuringiensis var. xiaguangiensis; Bacillus thuringiensis var. yosoo; Bacillus thuringiensis var. yunnanensis; Bacillus thuringiensis var. zhaodongensis; and Bacillus thuringiensis var. konkukian toxin.

[1278] In some embodiments, a combination or composition comprises, consists essentially of, or consists of: a U1-agatoxin-Ta1b peptide having an amino acid sequence according to the amino acid sequence set forth in SEQ ID NO: 1, and a Bt toxin, wherein the Bt toxin is one or more fermentation solids, spores, or toxins isolated from the group consisting of: Bacillus thuringiensis var. kurstaki (Btk); Bacillus thuringiensis var. tenebrionis (Btt); and Bacillus thuringiensis var. israelensis (Bti).

[1279] In some embodiments, a combination or composition comprises, consists essentially of, or consists of: a U1-agatoxin-Ta1b peptide having an amino acid sequence according to the amino acid sequence set forth in SEQ ID NO: 1, and a Bt toxin, wherein the Bt toxin is a parasporal crystal toxin, a secreted protein, a β-exotoxin, a 41.9-kDa insecticidal toxin, a sphaericolysin, an alveolysin, or an enhancin-like protein.

[1280] In some embodiments, a combination or composition comprises, consists essentially of, or consists of: a U1-agatoxin-Ta1b peptide having an amino acid sequence according to the amino acid sequence set forth in SEQ ID NO: 1, and a parasporal crystal toxin, wherein the parasporal crystal toxin is a δ-endotoxin.

[1281] In some embodiments, a combination or composition comprises, consists essentially of, or consists of: a U1-agatoxin-Ta1b peptide having an amino acid sequence according to the amino acid sequence set forth in SEQ ID NO: 1, and a δ-endotoxin, wherein the δ-endotoxin is a Three-domain (3D) Cry family protein, a binary Bin-like family toxin, an ETX_MTX2-like family toxin, a Toxin-10 family toxin, an Aerolysin family toxin, or a cytolysin.

[1282] In some embodiments, a combination or composition comprises, consists essentially of, or consists of: a U1-agatoxin-Ta1b peptide having an amino acid sequence according to the amino acid sequence set forth in SEQ ID NO: 1, and a δ-endotoxin, wherein the δ-endotoxin is a Three-domain (3D) Cry toxin, a mosquitocidal Cry toxin (Mtx), a binary-like (Bin) toxin, or a Cyt toxin.

[1283] In some embodiments, a combination or composition comprises, consists essentially of, or consists of: a U1-agatoxin-Ta1b peptide having an amino acid sequence according to the amino acid sequence set forth in SEQ ID NO: 1, and a δ-endotoxin, wherein the δ-endotoxin is a Three-domain (3D) Cry toxin or a Cyt toxin.

[1284] In some embodiments, a combination or composition comprises, consists essentially of, or consists of: a U+2-ACTX-Hv1a toxin having an amino acid sequence according to the amino acid sequence set forth in SEQ ID NO: 61, and a δ-endotoxin, wherein the δ-endotoxin is selected from the group consisting of: Cry1Aa1, Cry1Aa2, Cry1Aa3, Cry1Aa4, Cry1Aa5, Cry1Aa6, Cry1Aa7, Cry1Aa8, Cry1Aa9, Cry1Aa10, Cry1Aa11, Cry1Aa12, Cry1Aa13, Cry1Aa14, Cry1Aa15, Cry1Aa16, Cry1Aa17, Cry1Aa18, Cry1Aa19, Cry1Aa20, Cry1Aa21, Cry1Aa22, Cry1Aa23, Cry1Aa24, Cry1Aa25, Cry1Ab1, Cry1Ab2, Cry1Ab3, Cry1Ab4, Cry1Ab5, Cry1Ab6, Cry1Ab7, Cry1Ab8, Cry1Ab9, Cry1Ab10, Cry1Ab11, Cry1Ab12, Cry1Ab13, Cry1Ab14, Cry1Ab15, Cry1Ab16, Cry1Ab17, Cry1Ab18, Cry1Ab19, Cry1Ab20, Cry1Ab21, Cry1Ab22, Cry1Ab23, Cry1Ab24, Cry1Ab25, Cry1Ab26, Cry1Ab27, Cry1Ab28, Cry1Ab29, Cry1Ab30, Cry1Ab31, Cry1Ab32, Cry1Ab33, Cry1Ab34, Cry1Ab35, Cry1Ab36, Cry1Ab-like, Cry1Ab-like, Cry1Ab-like, Cry1Ab-like, Cry1Aa1, Cry1Ac2, Cry1Ac3, Cry1Ac4, Cry1Ac5, Cry1Ac6, Cry1Ac7, Cry1Ac8, Cry1Ac9, Cry1Ac10, Cry1Ac11, Cry1Ac12, Cry1Ac13, Cry1Ac14, Cry1Ac15, Cry1Ac16, Cry1Ac17, Cry1Ac18, Cry1Ac19, Cry1Ac20, Cry1Ac21, Cry1Ac22, Cry1Ac23, Cry1Ac24, Cry1Ac25, Cry1Ac26, Cry1Ac27, Cry1Ac28, Cry1Ac29, Cry1Ac30, Cry1Ac31, Cry1Ac32, Cry1Ac33, Cry1Ac34, Cry1Ac35, Cry1Ac36, Cry1Ac37, Cry1Ac38, Cry1Ac39, Cry1Ad1, Cry1Ad2, Cry1Ae1, Cry1Af1, Cry1Ag1, Cry1Ah1, Cry1Ah2, Cry1Ah3, Cry1Ai1, Cry1Ai2, Cry1Aj1, Cry1A-like, Cry1Ba1, Cry1Ba2, Cry1Ba3, Cry1Ba4, Cry1Ba5, Cry1Ba6, Cry1Ba7, Cry1Ba8, Cry1Bb1, Cry1Bb2, Cry1Bb3, Cry1Bc1, Cry1Bd1, Cry1Bd2, Cry1Bd3, Cry1Be1, Cry1Be2, Cry1Be3, Cry1Be4, Cry1Be5, Cry1Bf1, Cry1Bf2, Cry1Bg1, Cry1Bh1, Cry1Bi1, Cry1Bj1, Cry1Ca1, Cry1Ca2, Cry1Ca3, Cry1Ca4, Cry1Ca5, Cry1Ca6, Cry1Ca7, Cry1Ca8, Cry1Ca9, Cry1Ca10, Cry1Ca11, Cry1Ca12, Cry1Ca13, Cry1Ca14, Cry1Ca15, Cry1Cb1, Cry1Cb2, Cry1Cb3, Cry1Cb-like, Cry1Da1, Cry1Da2, Cry1Da3, Cry1Da4, Cry1Da5, Cry1db1, Cry1db2, Cry1Dc1, Cry1Dd1, Cry1Ea1, Cry1Ea2, Cry1Ea3, Cry1Ea4, Cry1Ea5, Cry1Ea6, Cry1Ea7, Cry1Ea8, Cry1Ea9, Cry1Ea10, Cry1Ea11, Cry1Ea12, Cry1Eb1, Cry1Fa1, Cry1Fa2, Cry1Fa3, Cry1Fa4, Cry1Fb1, Cry1Fb2, Cry1Fb3, Cry1Fb4, Cry1Fb5, Cry1Fb6, Cry1Fb7, Cry1Ga1, Cry1Ga2, Cry1Gb1, Cry1Gb2, Cry1Gc1, Cry1Ha1, Cry1Hb1, Cry1Hb2, Cry1Hc1, Cry1H-like, Cry1Ia1, Cry1Ia2, Cry1Ia3, Cry1Ia4, Cry1Ia5, Cry1Ia6, Cry1Ia7, Cry1Ia8, Cry1Ia9, Cry1Ia10, Cry1Ia11, Cry1Ia12, Cry1Ia13, Cry1Ia14, Cry1Ia15, Cry1Ia16, Cry1Ia17, Cry1Ia18, Cry1Ia19, Cry1Ia20, Cry1Ia21, Cry1Ia22, Cry1Ia23, Cry1Ia24, Cry1Ia25, Cry1Ia26, Cry1Ia27, Cry1Ia28, Cry1Ia29, Cry1Ia30, Cry1Ia31, Cry1Ia32, Cry1Ia33, Cry1Ia34, Cry1Ia35, Cry1Ia36, Cry1Ia37, Cry1Ia38, Cry1Ia39, Cry1Ia40, Cry1Ib1, Cry1Ib2, Cry1Ib3, Cry1Ib4, Cry1Ib5, Cry1Ib6, Cry1Ib7, Cry1Ib8, Cry1Ib9, Cry1Ib10, Cry1Ib11, Cry1Ic1, Cry1Ic2, Cry1Id1, Cry1Id2, Cry1Id3, Cry1Ie1, Cry1Ie2, Cry1Ie3, Cry1Ie4, Cry1Ie5, Cry1If1, Cry1Ig1, Cry1I-like, Cry1I-like, Cry1Ia1, Cry1Ja2, Cry1Ja3, Cry1Jb1, Cry1Jc1, Cry1Jc2, Cry1Jd1, Cry1Ka1, Cry1Ka2, Cry1La1, Cry1La2, Cry1La3, Cry1Ma1, Cry1Ma2, Cry1Na1, Cry1Na2, Cry1Na3, Cry1Nb1, Cry1-like, Cry2Aa1, Cry2Aa2, Cry2Aa3, Cry2Aa4, Cry2Aa5, Cry2Aa6, Cry2Aa7, Cry2Aa8, Cry2Aa9, Cry2Aa10, Cry2Aa11, Cry2Aa12, Cry2Aa13, Cry2Aa14, Cry2Aa15, Cry2Aa16, Cry2Aa17, Cry2Aa18, Cry2Aa19, Cry2Aa20, Cry2Aa21, Cry2Aa22, Cry2Aa23, Cry2Aa23, Cry2Aa25, Cry2Ab1, Cry2Ab2, Cry2Ab3, Cry2Ab4, Cry2Ab5, Cry2Ab6, Cry2Ab7, Cry2Ab8, Cry2Ab9, Cry2Ab10, Cry2Ab11, Cry2Ab12, Cry2Ab13, Cry2Ab14, Cry2Ab15, Cry2Ab16, Cry2Ab17, Cry2Ab18, Cry2Ab19, Cry2Ab20, Cry2Ab21, Cry2Ab22, Cry2Ab23, Cry2Ab24, Cry2Ab25, Cry2Ab26, Cry2Ab27, Cry2Ab28, Cry2Ab29, Cry2Ab30, Cry2Ab31, Cry2Ab32, Cry2Ab33, Cry2Ab34, Cry2Ab35, Cry2Ab36, Cry2Ac1, Cry2Ac2, Cry2Ac3, Cry2Ac4, Cry2Ac5, Cry2Ac6, Cry2Ac7, Cry2Ac8, Cry2Ac9, Cry2Ac10, Cry2Ac11, Cry2Ac12, Cry2Ad1, Cry2Ad2, Cry2Ad3, Cry2Ad4, Cry2Ad5, Cry2Ae1, Cry2Af1, Cry2Af2, Cry2Ag1, Cry2Ah1, Cry2Ah2, Cry2Ah3, Cry2Ah4, Cry2Ah5, Cry2Ah6, Cry2Ai1, Cry2Aj1, Cry2Ak1, Cry2A11, Cry2Ba1, Cry2Ba2, Cry3Aa1, Cry3Aa2, Cry3Aa3, Cry3Aa4, Cry3Aa5, Cry3Aa6, Cry3Aa7, Cry3Aa8, Cry3Aa9, Cry3Aa10, Cry3Aa11, Cry3Aa12, Cry3Ba1, Cry3Ba2, Cry3Ba3, Cry3Bb1, Cry3Bb2, Cry3Bb3, Cry3Ca1, Cry4Aa1, Cry4Aa2, Cry4Aa3, Cry4Aa4, Cry4A-like, Cry4Ba1, Cry4Ba2, Cry4Ba3, Cry4Ba4, Cry4Ba5, Cry4Ba-like, Cry4Ca1, Cry4Ca2, Cry4Cb1, Cry4Cb2, Cry4Cb3, Cry4Cc1, Cry5Aa1, Cry5Ab1, Cry5Ac1, Cry5Ad1, Cry5Ba1, Cry5Ba2, Cry5Ba3, Cry5Ca1, Cry5Ca2, Cry5Da1, Cry5Da2, Cry5Ea1, Cry5Ea2, Cry6Aa1, Cry6Aa2, Cry6Aa3, Cry6Ba1, Cry7Aa1, Cry7Aa2, Cry7Ab1, Cry7Ab2, Cry7Ab3, Cry7Ab4, Cry7Ab5, Cry7Ab6, Cry7Ab7, Cry7Ab8, Cry7Ab9, Cry7Ac1, Cry7Ba1, Cry7Bb1, Cry7Ca1, Cry7Cb1, Cry7Da1, Cry7Da2, Cry7Da3, Cry7Ea1, Cry7Ea2, Cry7Ea3, Cry7Fa1, Cry7Fa2, Cry7Fb1, Cry7Fb2, Cry7Fb3, Cry7Ga1, Cry7Ga2, Cry7Gb1, Cry7Gc1, Cry7Gd1, Cry7Ha1, Cry7Ia1, Cry7Ja1, Cry7Ka1, Cry7Kb1, Cry7La1, Cry8Aa1, Cry8Ab1, Cry8Ac1, Cry8Ad1, Cry8Ba1, Cry8Bb1, Cry8Bc1, Cry8Ca1, Cry8Ca2, Cry8Ca3, Cry8Ca4, Cry8Ca5, Cry8Da1, Cry8Da2, Cry8Da3, Cry8db1, Cry8Ea1, Cry8Ea2, Cry8Ea3, Cry8Ea4, Cry8Ea5, Cry8Ea6, Cry8Fa1, Cry8Fa2, Cry8Fa3, Cry8Fa4, Cry8Ga1, Cry8Ga2, Cry8Ga3, Cry8Ha1, Cry8Hb1, Cry8Ia1, Cry8Ia2, Cry8Ia3, Cry8Ia4, Cry8Ib1, Cry8Ib2, Cry8Ib3, Cry8Ja1, Cry8Ka1, Cry8Ka2, Cry8Ka3, Cry8Kb1, Cry8Kb2, Cry8Kb3, Cry8La1, Cry8Ma1, Cry8Ma2, Cry8Ma3, Cry8Na1, Cry8Pa1, Cry8Pa2, Cry8Pa3, Cry8Qa1, Cry8Qa2, Cry8Ra1, Cry8Sa1, Cry8Ta1, Cry8-like, Cry8-like, Cry9Aa1, Cry9Aa2, Cry9Aa3, Cry9Aa4, Cry9Aa5, Cry9Aa, like, Cry9Ba1, Cry9Ba2, Cry9Bb1, Cry9Ca1, Cry9Ca2, Cry9Cb1, Cry9Da1, Cry9Da2, Cry9Da3, Cry9Da4, Cry9db1, Cry9Dc1, Cry9Ea1, Cry9Ea2, Cry9Ea3, Cry9Ea4, Cry9Ea5, Cry9Ea6, Cry9Ea7, Cry9Ea8, Cry9Ea9, Cry9Ea10, Cry9Ea11, Cry9Eb1, Cry9Eb2, Cry9Eb3, Cry9Ec1, Cry9Ed1, Cry9Ee1, Cry9Ee2, Cry9Fa1, Cry9Ga1, Cry9-like, Cry10Aa1, Cry10Aa2, Cry10Aa3, Cry10Aa4, Cry10A-like, Cry11Aa1, Cry11Aa2, Cry11Aa3, Cry11Aa4, Cry11Aa5, Cry11Aa-like, Cry11Ba1, Cry11Bb1, Cry11Bb2, Cry12Aa1, Cry13Aa1, Cry13Aa2, Cry14Aa1, Cry14Ab1, Cry15Aa1, Cry16Aa1, Cry17Aa1, Cry18Aa1, Cry18Ba1, Cry18Ca1, Cry19Aa1, Cry19Ba1, Cry19Ca1, Cry20Aa1, Cry20Ba1, Cry20Ba2, Cry20-like, Cry21Aa1, Cry21Aa2, Cry21Aa3, Cry21Ba1, Cry21Ca1, Cry21Ca2, Cry21Da1, Cry21Ea1, Cry21Fa1, Cry21Ga1, Cry21Ha1, Cry22Aa1, Cry22Aa2, Cry22Aa3, Cry22Ab1, Cry22Ab2, Cry22Ba1, Cry22Bb1, Cry23Aa1, Cry24Aa1, Cry24Ba1, Cry24Ca1, Cry24Da1, Cry25Aa1, Cry26Aa1, Cry27Aa1, Cry28Aa1, Cry28Aa2, Cry29Aa1, Cry29Ba1, Cry30Aa1, Cry30Ba1, Cry30Ca1, Cry30Ca2, Cry30Da1, Cry30db1, Cry30Ea1, Cry30Ea2, Cry30Ea3, Cry30Ea4, Cry30Fa1, Cry30Ga1, Cry30Ga2, Cry31Aa1, Cry31Aa2, Cry31Aa3, Cry31Aa4, Cry31Aa5, Cry31Aa6, Cry31Ab1, Cry31Ab2, Cry31Ac1, Cry31Ac2, Cry31Ad1, Cry31Ad2, Cry32Aa1, Cry32Aa2, Cry32Ab1, Cry32Ba1, Cry32Ca1, Cry32Cb1, Cry32Da1, Cry32Ea1, Cry32Ea2, Cry32Eb1, Cry32Fa1, Cry32Ga1, Cry32Ha1, Cry32Hb1, Cry32Ia1, Cry32Ja1, Cry32Ka1, Cry32La1, Cry32Ma1, Cry32 Mb1, Cry32Na1, Cry32Oa1, Cry32Pa1, Cry32Qa1, Cry32Ra1, Cry32Sa1, Cry32Ta1, Cry32Ua1, Cry32Va1, Cry32Wa1, Cry32Wa2, Cry32Xa1, Cry32Ya1, Cry33Aa1, Cry34Aa1, Cry34Aa2, Cry34Aa3, Cry34Aa4, Cry34Ab1, Cry34Ac1, Cry34Ac2, Cry34Ac3, Cry34Ba1, Cry34Ba2, Cry34Ba3, Cry35Aa1, Cry35Aa2, Cry35Aa3, Cry35Aa4, Cry35Ab1, Cry35Ab2, Cry35Ab3, Cry35Ac1, Cry35Ba1, Cry35Ba2, Cry35Ba3, Cry36Aa1, Cry37Aa1, Cry38Aa1, Cry39Aa1, Cry40Aa1, Cry40Ba1, Cry40Ca1, Cry40Da1, Cry41Aa1, Cry41Ab1, Cry41Ba1, Cry41Ba2, Cry41Ca1, Cry42Aa1, Cry43Aa1, Cry43Aa2, Cry43Ba1, Cry43Ca1, Cry43Cb1, Cry43Cc1, Cry43-like, Cry44Aa1, Cry45Aa1, Cry45Ba1, Cry46Aa1, Cry46Aa2, Cry46Ab1, Cry47Aa1, Cry48Aa1, Cry48Aa2, Cry48Aa3, Cry48Ab1, Cry48Ab2, Cry49Aa1, Cry49Aa2, Cry49Aa3, Cry49Aa4, Cry49Ab1, Cry50Aa1, Cry50Ba1, Cry50Ba2, Cry51Aa1, Cry51Aa2, Cry52Aa1, Cry52Ba1, Cry52Ca1, Cry53Aa1, Cry53Ab1, Cry54Aa1, Cry54Aa2, Cry54Ab1, Cry54Ba1, Cry54Ba2, Cry55Aa1, Cry55Aa2, Cry55Aa3, Cry56Aa1, Cry56Aa2, Cry56Aa3, Cry56Aa4, Cry57Aa1, Cry57Ab1, Cry58Aa1, Cry59Ba1, Cry59Aa1, Cry60Aa1, Cry60Aa2, Cry60Aa3, Cry60Ba1, Cry60Ba2, Cry60Ba3, Cry61Aa1, Cry61Aa2, Cry61Aa3, Cry62Aa1, Cry63Aa1, Cry64Aa1, Cry64Ba1, Cry64Ca1, Cry65Aa1, Cry65Aa2, Cry66Aa1, Cry66Aa2, Cry67Aa1, Cry67Aa2, Cry68Aa1, Cry69Aa1, Cry69Aa2, Cry69Ab1, Cry70Aa1, Cry70Ba1, Cry70Bb1, Cry71Aa1, Cry72Aa1, Cry72Aa2, Cry73Aa1, Cry74Aa, Cry75Aa1, Cry75Aa2, Cry75Aa3, Cry76Aa1, Cry77Aa1, or Cry78Aa1, Cyt1Aa1, Cyt1Aa2, Cyt1Aa3, Cyt1Aa4, Cyt1Aa5, Cyt1Aa6, Cyt1Aa7, Cyt1Aa8, Cyt1Aa-like, Cyt1Ab1, Cyt1Ba1, Cyt1Ca1, Cyt1Da1, Cyt1Da2, Cyt2Aa1, Cyt2Aa2, Cyt2Aa3, Cyt2Aa4, Cyt2Ba1, Cyt2Ba2, Cyt2Ba3, Cyt2Ba4, Cyt2Ba5, Cyt2Ba6, Cyt2Ba7, Cyt2Ba8, Cyt2Ba9, Cyt2Ba10, Cyt2Ba11, Cyt2Ba12, Cyt2Ba13, Cyt2Ba14, Cyt2Ba15, Cyt2Ba16, Cyt2Ba-like, Cyt2Bb1, Cyt2Bc1, Cyt2B-like, Cyt2Ca1, and Cyt3Aa1.

[1285] In some embodiments, a combination or composition comprises, consists essentially of, or consists of: a U1-agatoxin-Ta1b peptide having an amino acid sequence according to the amino acid sequence set forth in SEQ ID NO: 1, and a Cry toxin, or a Cyt toxin, wherein the Cry toxin or Cyt toxin has an amino acid sequence according to SEQ ID NOs: 412-481.

[1286] In some embodiments, a combination or composition comprises, consists essentially of, or consists of: a U1-agatoxin-Ta1b peptide having an amino acid sequence according to the amino acid sequence set forth in SEQ ID NO: 1, and a Bt toxin, wherein the Bt toxin is a secreted protein.

[1287] In some embodiments, a combination or composition comprises, consists essentially of, or consists of: a U1-agatoxin-Ta1b peptide having an amino acid sequence according to the amino acid sequence set forth in SEQ ID NO: 1, and a Bt toxin, wherein the Bt toxin is a secreted protein, wherein the secreted protein is a vegetative insecticidal protein (Vip), a secreted insecticidal protein (Sip), a Bin-like family protein, or an ETX_MTX2-family protein.

[1288] In some embodiments, a combination or composition comprises, consists essentially of, or consists of: a U1-agatoxin-Ta1b peptide having an amino acid sequence according to the amino acid sequence set forth in SEQ ID NO: 1, and a Bt toxin, wherein the Bt toxin is a secreted protein, and wherein the secreted protein is a Vip.

[1289] In some embodiments, a combination or composition comprises, consists essentially of, or consists of: a U1-agatoxin-Ta1b peptide having an amino acid sequence according to the amino acid sequence set forth in SEQ ID NO: 1, and a Vip, wherein the Vip is a Vip 1 family protein, a Vip 2 family protein, a Vip 3 family protein, or a Vip 4 family protein.

[1290] In some embodiments, a combination or composition comprises, consists essentially of, or consists of: a U1-agatoxin-Ta1b peptide having an amino acid sequence according to the amino acid sequence set forth in SEQ ID NO: 1, and a Vip, wherein the Vip is selected from the group consisting of: Vip1Aa1, Vip1Aa2, Vip1Aa3, Vip1Ab1, Vip1Ac1, Vip1Ad1, Vip1Ba1, Vip1Ba2, Vip1Bb1, Vip1Bb2, Vip1Bb3, Vip1Bc1, Vip1Ca1, Vip1Ca2, Vip1Da1, Vip2Aa1, Vip2Aa2, Vip2Aa3, Vip2Ab1, Vip2Ac1, Vip2Ac2, Vip2Ad1, Vip2Ae1, Vip2Ae2, Vip2Ae3, Vip2Af1, Vip2Af2, Vip2Ag1, Vip2Ag2, Vip2Ba1, Vip2Ba2, Vip2Bb1, Vip2Bb2, Vip2Bb3, Vip2Bb4, Vip3Aa1, Vip3Aa2, Vip3Aa3, Vip3Aa4, Vip3Aa5, Vip3Aa6, Vip3Aa7, Vip3Aa8, Vip3Aa9, Vip3Aa10, Vip3Aa11, Vip3Aa12, Vip3Aa13, Vip3Aa14, Vip3Aa15, Vip3Aa16, Vip3Aa17, Vip3Aa18, Vip3Aa19.0, Vip3Aa19, Vip3Aa20, Vip3Aa21, Vip3Aa22, Vip3Aa23, Vip3Aa24, Vip3Aa25, Vip3Aa26, Vip3Aa27, Vip3Aa28, Vip3Aa29, Vip3Aa30, Vip3Aa31, Vip3Aa32, Vip3Aa33, Vip3Aa34, Vip3Aa35, Vip3Aa36, Vip3Aa37, Vip3Aa38, Vip3Aa39, Vip3Aa40, Vip3Aa41, Vip3Aa42, Vip3Aa43, Vip3Aa44, Vip3Aa45, Vip3Aa46, Vip3Aa47, Vip3Aa48, Vip3Aa49, Vip3Aa50, Vip3Aa51, Vip3Aa52, Vip3Aa53, Vip3Aa54, Vip3Aa55, Vip3Aa56, Vip3Aa57, Vip3Aa58, Vip3Aa59, Vip3Aa60, Vip3Aa61, Vip3Aa62, Vip3Aa63, Vip3Aa64, Vip3Aa65, Vip3Aa66, Vip3Ab1, Vip3Ab2, Vip3Ac1, Vip3Ad1, Vip3Ad2, Vip3Ad3, Vip3Ad4, Vip3Ad5, Vip3Ad6, Vip3Ae1, Vip3Af1, Vip3Af2, Vip3Af3, Vip3Af4, Vip3Ag1, Vip3Ag2, Vip3Ag3, Vip3Ag4, Vip3Ag5, Vip3Ag6, Vip3Ag7, Vip3Ag8, Vip3Ag9, Vip3Ag10, Vip3Ag11, Vip3Ag12, Vip3Ag13, Vip3Ag14, Vip3Ag15, Vip3Ah1, Vip3Ah2, Vip3Ai1, Vip3Aj1, Vip3Aj2, Vip3Ba1, Vip3Ba2, Vip3Bb1, Vip3Bb2, Vip3Bb3, Vip3Bc, Vip3Ca1, Vip3Ca2, Vip3Ca3, Vip3Ca4, and Vip4Aa1.

[1291] In some embodiments, a combination or composition comprises, consists essentially of, or consists of: a U1-agatoxin-Ta1b peptide having an amino acid sequence according to the amino acid sequence set forth in SEQ ID NO: 1, and a Vip, wherein the Vip protein has an amino acid sequence according to the amino acid sequence set forth in SEQ ID NOs: 482-587.

[1292] In some embodiments, a combination or composition comprises, consists essentially of, or consists of: one or more fermentation solids, spores, or toxins isolated from a Bacillus thuringiensis ssp. kurstaki strain EVB-113-19; a Bacillus thuringiensis ssp. tenebrionis strain NB-176; or a Bacillus thuringiensis ssp. israelensis strain BMP 144; and a U1-agatoxin-Ta1b peptide having an amino acid sequence according to the amino acid sequence set forth in SEQ ID NO: 1.

[1293] In some embodiments, a combination or composition comprises, consists essentially of, or consists of: one or more fermentation solids, spores, or toxins isolated from a Bacillus thuringiensis ssp. kurstaki strain EVB-113-19, and a U1-agatoxin-Ta1b peptide having an amino acid sequence according to the amino acid sequence set forth in SEQ ID NO: 1.

[1294] In some embodiments, a combination or composition comprises, consists essentially of, or consists of: a U1-agatoxin-Ta1b peptide having an amino acid sequence according to the amino acid sequence set forth in SEQ ID NO: 1, and one or more fermentation solids, spores, or toxins isolated from a Bacillus thuringiensis ssp. kurstaki strain EVB-113-19, wherein the combination or composition comprises a concentration of U1-agatoxin-Ta1b peptide having an amino acid sequence according to the amino acid sequence set forth in SEQ ID NO: 1 ranging from about 0.0001% w/w, 0.0005% w/w, 0.001% w/w, 0.005% w/w, 0.01% w/w, 0.02% w/w, 0.03% w/w, 0.04% w/w, 0.05% w/w, 0.06% w/w, 0.07% w/w, 0.08% w/w, 0.09% w/w, 0.1% w/w, 0.2% w/w, 0.3% w/w, 0.4% w/w, 0.5% w/w, 0.6% w/w, 0.7% w/w, 0.8% w/w, 0.9% w/w, 1% w/w, 2% w/w, 3% w/w, 4% w/w, 5% w/w, 6% w/w, 7% w/w, 8% w/w, 9% w/w, 10% w/w, 11% w/w, 12% w/w, 13% w/w, 14% w/w, 15% w/w, 16% w/w, 17% w/w, 18% w/w, 19% w/w, 20% w/w, 21% w/w, 22% w/w, 23% w/w, 24% w/w, 25% w/w, 26% w/w, 27% w/w, 28% w/w, 29% w/w, 30% w/w, 31% w/w, 32% w/w, 33% w/w, 34% w/w, 35% w/w, 36% w/w, 37% w/w, 38% w/w, 39% w/w, 40% w/w, 41% w/w, 42% w/w, 43% w/w, 44% w/w, 45% w/w, 46% w/w, 47% w/w, 48% w/w, 49% w/w, 50% w/w, 51% w/w, 52% w/w, 53% w/w, 54% w/w, 55% w/w, 56% w/w, 57% w/w, 58% w/w, 59% w/w, 60% w/w, 61% w/w, 62% w/w, 63% w/w, 64% w/w, 65% w/w, 66% w/w, 67% w/w, 68% w/w, 69% w/w, 70% w/w, 71% w/w, 72% w/w, 73% w/w, 74% w/w, 75% w/w, 76% w/w, 77% w/w, 78% w/w, 79% w/w, 80% w/w, 81% w/w, 82% w/w, 83% w/w, 84% w/w, 85% w/w, 86% w/w, 87% w/w, 88% w/w, 89% w/w, 90% w/w, 91% w/w, 92% w/w, 93% w/w, 94% w/w, 95% w/w, 96% w/w, 97% w/w, 98% w/w, 99% w/w, 99.1% w/w, 99.2% w/w, 99.3% w/w, 99.4% w/w, 99.5% w/w, 99.6% w/w, 99.7% w/w, 99.8% w/w, or about 99.9% w/w of the total composition.

[1295] In some embodiments, a combination or composition comprises, consists essentially of, or consists of: a U1-agatoxin-Ta1b peptide having an amino acid sequence according to the amino acid sequence set forth in SEQ ID NO: 1, and one or more fermentation solids, spores, or toxins isolated from a Bacillus thuringiensis ssp. kurstaki strain EVB-113-19, wherein the combination or composition comprises a concentration of one or more fermentation solids, spores, or toxins isolated from a Bacillus thuringiensis ssp. kurstaki strain EVB-113-19 ranging from about 0.0001% w/w, 0.0005% w/w, 0.001% w/w, 0.005% w/w, 0.01% w/w, 0.02% w/w, 0.03% w/w, 0.04% w/w, 0.05% w/w, 0.06% w/w, 0.07% w/w, 0.08% w/w, 0.09% w/w, 0.1% w/w, 0.2% w/w, 0.3% w/w, 0.4% w/w, 0.5% w/w, 0.6% w/w, 0.7% w/w, 0.8% w/w, 0.9% w/w, 1% w/w, 2% w/w, 3% w/w, 4% w/w, 5% w/w, 6% w/w, 7% w/w, 8% w/w, 9% w/w, 10% w/w, 11% w/w, 12% w/w, 13% w/w, 14% w/w, 15% w/w, 16% w/w, 17% w/w, 18% w/w, 19% w/w, 20% w/w, 21% w/w, 22% w/w, 23% w/w, 24% w/w, 25% w/w, 26% w/w, 27% w/w, 28% w/w, 29% w/w, 30% w/w, 31% w/w, 32% w/w, 33% w/w, 34% w/w, 35% w/w, 36% w/w, 37% w/w, 38% w/w, 39% w/w, 40% w/w, 41% w/w, 42% w/w, 43% w/w, 44% w/w, 45% w/w, 46% w/w, 47% w/w, 48% w/w, 49% w/w, 50% w/w, 51% w/w, 52% w/w, 53% w/w, 54% w/w, 55% w/w, 56% w/w, 57% w/w, 58% w/w, 59% w/w, 60% w/w, 61% w/w, 62% w/w, 63% w/w, 64% w/w, 65% w/w, 66% w/w, 67% w/w, 68% w/w, 69% w/w, 70% w/w, 71% w/w, 72% w/w, 73% w/w, 74% w/w, 75% w/w, 76% w/w, 77% w/w, 78% w/w, 79% w/w, 80% w/w, 81% w/w, 82% w/w, 83% w/w, 84% w/w, 85% w/w, 86% w/w, 87% w/w, 88% w/w, 89% w/w, 90% w/w, 91% w/w, 92% w/w, 93% w/w, 94% w/w, 95% w/w, 96% w/w, 97% w/w, 98% w/w, 99% w/w, 99.1% w/w, 99.2% w/w, 99.3% w/w, 99.4% w/w, 99.5% w/w, 99.6% w/w, 99.7% w/w, 99.8% w/w, or about 99.9% w/w of the total composition.

[1296] Combinations: Exemplary Combinations of Bt Toxins and TVPs

[1297] In some embodiments, a combination or composition comprises, consists essentially of, or consists of: a U1-agatoxin-Ta1b Variant Polypeptide (TVP) having an amino acid sequence according to the amino acid sequence set forth in SEQ ID NO: 2, and a bacterial toxin, wherein the bacterial toxin is a Bacillus thuringiensis (Bt) toxin.

[1298] In some embodiments, a combination or composition comprises, consists essentially of, or consists of: a U1-agatoxin-Ta1b Variant Polypeptide (TVP) having an amino acid sequence according to the amino acid sequence set forth in SEQ ID NO: 2, and a Bt toxin, wherein the Bt toxin is one or more fermentation solids, spores, or toxins isolated from the group consisting of: Bacillus thuringiensis var. kurstaki (Btk); Bacillus thuringiensis var. tenebrionis (Btt); Bacillus thuringiensis var. israelensis (Bti); Bacillus thuringiensis var. aizawai; Bacillus thuringiensis var. aizawai/pacificus; Bacillus thuringiensis var. alesti; Bacillus thuringiensis var. amagiensis; Bacillus thuringiensis var. andalousiensis; Bacillus thuringiensis var. argentinensis; Bacillus thuringiensis var. asturiensis; Bacillus thuringiensis var. azorensis; Bacillus thuringiensis var. balearica; Bacillus thuringiensis var. berliner; Bacillus thuringiensis var. bolivia; Bacillus thuringiensis var. brasilensis; Bacillus thuringiensis var. cameroun; Bacillus thuringiensis var. canadensis; Bacillus thuringiensis var. chanpaisis; Bacillus thuringiensis var. chinensis; Bacillus thuringiensis var. colmeri; Bacillus thuringiensis var. coreanensis; Bacillus thuringiensis var. dakota; Bacillus thuringiensis var. darmstadiensis; Bacillus thuringiensis var. dendrolimus; Bacillus thuringiensis var. entomocidus; Bacillus thuringiensis var. entomocidus/subtoxicus; Bacillus thuringiensis var. finitimus; Bacillus thuringiensis var. fukuokaensis; Bacillus thuringiensis var. galechiae; Bacillus thuringiensis var. galleriae; Bacillus thuringiensis var. graciosensis; Bacillus thuringiensis var. guiyangiensis; Bacillus thuringiensis var. higo; Bacillus thuringiensis var. huazhongensis; Bacillus thuringiensis var. iberica; Bacillus thuringiensis var. indiana; Bacillus thuringiensis var. israelensis/tochigiensis; Bacillus thuringiensis var. japonensis; Bacillus thuringiensis var. jegathesan; Bacillus thuringiensis var. jinghongiensis; Bacillus thuringiensis var. kenyae; Bacillus thuringiensis var. kim; Bacillus thuringiensis var. kumamtoensis; Bacillus thuringiensis var. kunthalanags3; Bacillus thuringiensis var. kunthalaRX24; Bacillus thuringiensis var. kunthalaRX27; Bacillus thuringiensis var. kunthalaRX28; Bacillus thuringiensis var. kyushuensis; Bacillus thuringiensis var. leesis; Bacillus thuringiensis var. londrina; Bacillus thuringiensis var. malayensis; Bacillus thuringiensis var. medellin; Bacillus thuringiensis var. mexicanensis; Bacillus thuringiensis var. mogi; Bacillus thuringiensis var. monterrey; Bacillus thuringiensis var. morrisoni; Bacillus thuringiensis var. muju; Bacillus thuringiensis var. navarrensis; Bacillus thuringiensis var. neoleonensis; Bacillus thuringiensis var. nigeriensis; Bacillus thuringiensis var. novosibirsk; Bacillus thuringiensis var. ostriniae; Bacillus thuringiensis var. oswaldocruzi; Bacillus thuringiensis var. pahangi; Bacillus thuringiensis var. pakistani; Bacillus thuringiensis var. palmanyolensis; Bacillus thuringiensis var. pingluonsis; Bacillus thuringiensis var. pirenaica; Bacillus thuringiensis var. poloniensis; Bacillus thuringiensis var. pondicheriensis; Bacillus thuringiensis var. pulsiensis; Bacillus thuringiensis var. rongseni; Bacillus thuringiensis var. roskildiensis; Bacillus thuringiensis var. san diego; Bacillus thuringiensis var. seoulensis; Bacillus thuringiensis var. shandongiensis; Bacillus thuringiensis var. silo; Bacillus thuringiensis var. sinensis; Bacillus thuringiensis var. sooncheon; Bacillus thuringiensis var. sotto; Bacillus thuringiensis var. sotto/dendrolimus; Bacillus thuringiensis var. subtoxicus; Bacillus thuringiensis var. sumiyoshiensis; Bacillus thuringiensis var. sylvestriensis; Bacillus thuringiensis var. thailandensis; Bacillus thuringiensis var. thompsoni; Bacillus thuringiensis var. thuringiensis; Bacillus thuringiensis var. tochigiensis; Bacillus thuringiensis var. toguchini; Bacillus thuringiensis var. tohokuensis; Bacillus thuringiensis var. tolworthi; Bacillus thuringiensis var. toumanoffi; Bacillus thuringiensis var. vazensis; Bacillus thuringiensis var. wratislaviensis; Bacillus thuringiensis var. wuhanensis; Bacillus thuringiensis var. xiaguangiensis; Bacillus thuringiensis var. yosoo; Bacillus thuringiensis var. yunnanensis; Bacillus thuringiensis var. zhaodongensis; and Bacillus thuringiensis var. konkukian toxin.

[1299] In some embodiments, a combination or composition comprises, consists essentially of, or consists of: a U1-agatoxin-Ta1b Variant Polypeptide (TVP) having an amino acid sequence according to the amino acid sequence set forth in SEQ ID NO: 2, and a Bt toxin, wherein the Bt toxin is one or more fermentation solids, spores, or toxins isolated from the group consisting of: Bacillus thuringiensis var. kurstaki (Btk); Bacillus thuringiensis var. tenebrionis (Btt); and Bacillus thuringiensis var. israelensis (Bti).

[1300] In some embodiments, a combination or composition comprises, consists essentially of, or consists of: a U1-agatoxin-Ta1b Variant Polypeptide (TVP) having an amino acid sequence according to the amino acid sequence set forth in SEQ ID NO: 2, and a Bt toxin, wherein the Bt toxin is a parasporal crystal toxin, a secreted protein, a β-exotoxin, a 41.9-kDa insecticidal toxin, a sphaericolysin, an alveolysin, or an enhancin-like protein.

[1301] In some embodiments, a combination or composition comprises, consists essentially of, or consists of: a U1-agatoxin-Ta1b Variant Polypeptide (TVP) having an amino acid sequence according to the amino acid sequence set forth in SEQ ID NO: 2, and a parasporal crystal toxin, wherein the parasporal crystal toxin is a δ-endotoxin.

[1302] In some embodiments, a combination or composition comprises, consists essentially of, or consists of: a U1-agatoxin-Ta1b Variant Polypeptide (TVP) having an amino acid sequence according to the amino acid sequence set forth in SEQ ID NO: 2, and a δ-endotoxin, wherein the δ-endotoxin is a Three-domain (3D) Cry family protein, a binary Bin-like family toxin, an ETX_MTX2-like family toxin, a Toxin-10 family toxin, an Aerolysin family toxin, or a cytolysin.

[1303] In some embodiments, a combination or composition comprises, consists essentially of, or consists of: a U1-agatoxin-Ta1b Variant Polypeptide (TVP) having an amino acid sequence according to the amino acid sequence set forth in SEQ ID NO: 2, and a δ-endotoxin, wherein the δ-endotoxin is a Three-domain (3D) Cry toxin, a mosquitocidal Cry toxin (Mtx), a binary-like (Bin) toxin, or a Cyt toxin.

[1304] In some embodiments, a combination or composition comprises, consists essentially of, or consists of: a U1-agatoxin-Ta1b Variant Polypeptide (TVP) having an amino acid sequence according to the amino acid sequence set forth in SEQ ID NO: 2, and a δ-endotoxin, wherein the δ-endotoxin is a Three-domain (3D) Cry toxin or a Cyt toxin.

[1305] In some embodiments, a combination or composition comprises, consists essentially of, or consists of: a U1-agatoxin-Ta1b Variant Polypeptide (TVP) having an amino acid sequence according to the amino acid sequence set forth in SEQ ID NO: 2, and a δ-endotoxin, wherein the δ-endotoxin is selected from the group consisting of: Cry1Aa1, Cry1Aa2, Cry1Aa3, Cry1Aa4, Cry1Aa5, Cry1Aa6, Cry1Aa7, Cry1Aa8, Cry1Aa9, Cry1Aa10, Cry1Aa11, Cry1Aa12, Cry1Aa13, Cry1Aa14, Cry1Aa15, Cry1Aa16, Cry1Aa17, Cry1Aa18, Cry1Aa19, Cry1Aa20, Cry1Aa21, Cry1Aa22, Cry1Aa23, Cry1Aa24, Cry1Aa25, Cry1Ab1, Cry1Ab2, Cry1Ab3, Cry1Ab4, Cry1Ab5, Cry1Ab6, Cry1Ab7, Cry1Ab8, Cry1Ab9, Cry1Ab10, Cry1Ab11, Cry1Ab12, Cry1Ab13, Cry1Ab14, Cry1Ab15, Cry1Ab16, Cry1Ab17, Cry1Ab18, Cry1Ab19, Cry1Ab20, Cry1Ab21, Cry1Ab22, Cry1Ab23, Cry1Ab24, Cry1Ab25, Cry1Ab26, Cry1Ab27, Cry1Ab28, Cry1Ab29, Cry1Ab30, Cry1Ab31, Cry1Ab32, Cry1Ab33, Cry1Ab34, Cry1Ab35, Cry1Ab36, Cry1Ab-like, Cry1Ab-like, Cry1Ab-like, Cry1Ab-like, Cry1Ac1, Cry1Ac2, Cry1Ac3, Cry1Ac4, Cry1Ac5, Cry1Ac6, Cry1Ac7, Cry1Ac8, Cry1Ac9, Cry1Ac10, Cry1Ac11, Cry1Ac12, Cry1Ac13, Cry1Ac14, Cry1Ac15, Cry1Ac16, Cry1Ac17, Cry1Ac18, Cry1Ac19, Cry1Ac20, Cry1Ac21, Cry1Ac22, Cry1Ac23, Cry1Ac24, Cry1Ac25, Cry1Ac26, Cry1Ac27, Cry1Ac28, Cry1Ac29, Cry1Ac30, Cry1Ac31, Cry1Ac32, Cry1Ac33, Cry1Ac34, Cry1Ac35, Cry1Ac36, Cry1Ac37, Cry1Ac38, Cry1Ac39, Cry1Ad1, Cry1Ad2, Cry1Ae1, Cry1Af1, Cry1Ag1, Cry1Ah1, Cry1Ah2, Cry1Ah3, Cry1Ai1, Cry1Ai2, Cry1Aj1, Cry1A-like, Cry1Ba1, Cry1Ba2, Cry1Ba3, Cry1Ba4, Cry1Ba5, Cry1Ba6, Cry1Ba7, Cry1Ba8, Cry1Bb1, Cry1Bb2, Cry1Bb3, Cry1Bc1, Cry1Bd1, Cry1Bd2, Cry1Bd3, Cry1Be1, Cry1Be2, Cry1Be3, Cry1Be4, Cry1Be5, Cry1Bf1, Cry1Bf2, Cry1Bg1, Cry1Bh1, Cry1Bi1, Cry1Bj1, Cry1Ca1, Cry1Ca2, Cry1Ca3, Cry1Ca4, Cry1Ca5, Cry1Ca6, Cry1Ca7, Cry1Ca8, Cry1Ca9, Cry1Ca10, Cry1Ca11, Cry1Ca12, Cry1Ca13, Cry1Ca14, Cry1Ca15, Cry1Cb1, Cry1Cb2, Cry1Cb3, Cry1Cb-like, Cry1Da1, Cry1Da2, Cry1Da3, Cry1Da4, Cry1Da5, Cry1db1, Cry1db2, Cry1Dc1, Cry1Dd1, Cry1Ea1, Cry1Ea2, Cry1Ea3, Cry1Ea4, Cry1Ea5, Cry1Ea6, Cry1Ea7, Cry1Ea8, Cry1Ea9, Cry1Ea10, Cry1Ea11, Cry1Ea12, Cry1Eb1, Cry1Fa1, Cry1Fa2, Cry1Fa3, Cry1Fa4, Cry1Fb1, Cry1Fb2, Cry1Fb3, Cry1Fb4, Cry1Fb5, Cry1Fb6, Cry1Fb7, Cry1Ga1, Cry1Ga2, Cry1Gb1, Cry1Gb2, Cry1Gc1, Cry1Ha1, Cry1Hb1, Cry1Hb2, Cry1Hc1, Cry1H-like, Cry1Ia1, Cry1Ia2, Cry1Ia3, Cry1Ia4, Cry1Ia5, Cry1Ia6, Cry1Ia7, Cry1Ia8, Cry1Ia9, Cry1Ia10, Cry1Ia11, Cry1Ia12, Cry1Ia13, Cry1Ia14, Cry1Ia15, Cry1Ia16, Cry1Ia17, Cry1Ia18, Cry1Ia19, Cry1Ia20, Cry1Ia21, Cry1Ia22, Cry1Ia23, Cry1Ia24, Cry1Ia25, Cry1Ia26, Cry1Ia27, Cry1Ia28, Cry1Ia29, Cry1Ia30, Cry1Ia31, Cry1Ia32, Cry1Ia33, Cry1Ia34, Cry1Ia35, Cry1Ia36, Cry1Ia37, Cry1Ia38, Cry1Ia39, Cry1Ia40, Cry1Ib1, Cry1Ib2, Cry1Ib3, Cry1Ib4, Cry1Ib5, Cry1Ib6, Cry1Ib7, Cry1Ib8, Cry1Ib9, Cry1Ib10, Cry1Ib11, Cry1Ic1, Cry1Ic2, Cry1Id1, Cry1Id2, Cry1Id3, Cry1Ie1, Cry1Ie2, Cry1Ie3, Cry1Ie4, Cry1Ie5, Cry1If1, Cry1Ig1, Cry1I-like, Cry1I-like, Cry1Ja1, Cry1Ja2, Cry1Ja3, Cry1Jb1, Cry1Jc1, Cry1Jc2, Cry1Jd1, Cry1Ka1, Cry1Ka2, Cry1La1, Cry1La2, Cry1La3, Cry1Ma1, Cry1Ma2, Cry1Na1, Cry1Na2, Cry1Na3, Cry1Nb1, Cry1-like, Cry2Aa1, Cry2Aa2, Cry2Aa3, Cry2Aa4, Cry2Aa5, Cry2Aa6, Cry2Aa7, Cry2Aa8, Cry2Aa9, Cry2Aa10, Cry2Aa11, Cry2Aa12, Cry2Aa13, Cry2Aa14, Cry2Aa15, Cry2Aa16, Cry2Aa17, Cry2Aa18, Cry2Aa19, Cry2Aa20, Cry2Aa21, Cry2Aa22, Cry2Aa23, Cry2Aa23, Cry2Aa25, Cry2Ab1, Cry2Ab2, Cry2Ab3, Cry2Ab4, Cry2Ab5, Cry2Ab6, Cry2Ab7, Cry2Ab8, Cry2Ab9, Cry2Ab10, Cry2Ab11, Cry2Ab12, Cry2Ab13, Cry2Ab14, Cry2Ab15, Cry2Ab16, Cry2Ab17, Cry2Ab18, Cry2Ab19, Cry2Ab20, Cry2Ab21, Cry2Ab22, Cry2Ab23, Cry2Ab24, Cry2Ab25, Cry2Ab26, Cry2Ab27, Cry2Ab28, Cry2Ab29, Cry2Ab30, Cry2Ab31, Cry2Ab32, Cry2Ab33, Cry2Ab34, Cry2Ab35, Cry2Ab36, Cry2Ac1, Cry2Ac2, Cry2Ac3, Cry2Ac4, Cry2Ac5, Cry2Ac6, Cry2Ac7, Cry2Ac8, Cry2Ac9, Cry2Ac10, Cry2Ac11, Cry2Ac12, Cry2Ad1, Cry2Ad2, Cry2Ad3, Cry2Ad4, Cry2Ad5, Cry2Ae1, Cry2Af1, Cry2Af2, Cry2Ag1, Cry2Ah1, Cry2Ah2, Cry2Ah3, Cry2Ah4, Cry2Ah5, Cry2Ah6, Cry2Ai1, Cry2Aj1, Cry2Ak1, Cry2A11, Cry2Ba1, Cry2Ba2, Cry3Aa1, Cry3Aa2, Cry3Aa3, Cry3Aa4, Cry3Aa5, Cry3Aa6, Cry3Aa7, Cry3Aa8, Cry3Aa9, Cry3Aa10, Cry3Aa11, Cry3Aa12, Cry3Ba1, Cry3Ba2, Cry3Ba3, Cry3Bb1, Cry3Bb2, Cry3Bb3, Cry3Ca1, Cry4Aa1, Cry4Aa2, Cry4Aa3, Cry4Aa4, Cry4A-like, Cry4Ba1, Cry4Ba2, Cry4Ba3, Cry4Ba4, Cry4Ba5, Cry4Ba-like, Cry4Ca1, Cry4Ca2, Cry4Cb1, Cry4Cb2, Cry4Cb3, Cry4Cc1, Cry5Aa1, Cry5Ab1, Cry5Ac1, Cry5Ad1, Cry5Ba1, Cry5Ba2, Cry5Ba3, Cry5Ca1, Cry5Ca2, Cry5Da1, Cry5Da2, Cry5Ea1, Cry5Ea2, Cry6Aa1, Cry6Aa2, Cry6Aa3, Cry6Ba1, Cry7Aa1, Cry7Aa2, Cry7Ab1, Cry7Ab2, Cry7Ab3, Cry7Ab4, Cry7Ab5, Cry7Ab6, Cry7Ab7, Cry7Ab8, Cry7Ab9, Cry7Ac1, Cry7Ba1, Cry7Bb1, Cry7Ca1, Cry7Cb1, Cry7Da1, Cry7Da2, Cry7Da3, Cry7Ea1, Cry7Ea2, Cry7Ea3, Cry7Fa1, Cry7Fa2, Cry7Fb1, Cry7Fb2, Cry7Fb3, Cry7Ga1, Cry7Ga2, Cry7Gb1, Cry7Gc1, Cry7Gd1, Cry7Ha1, Cry7Ia1, Cry7Ja1, Cry7Ka1, Cry7Kb1, Cry7La1, Cry8Aa1, Cry8Ab1, Cry8Ac1, Cry8Ad1, Cry8Ba1, Cry8Bb1, Cry8Bc1, Cry8Ca1, Cry8Ca2, Cry8Ca3, Cry8Ca4, Cry8Ca5, Cry8Da1, Cry8Da2, Cry8Da3, Cry8db1, Cry8Ea1, Cry8Ea2, Cry8Ea3, Cry8Ea4, Cry8Ea5, Cry8Ea6, Cry8Fa1, Cry8Fa2, Cry8Fa3, Cry8Fa4, Cry8Ga1, Cry8Ga2, Cry8Ga3, Cry8Ha1, Cry8Hb1, Cry8Ia1, Cry8Ia2, Cry8Ia3, Cry8Ia4, Cry8Ib1, Cry8Ib2, Cry8Ib3, Cry8Ja1, Cry8Ka1, Cry8Ka2, Cry8Ka3, Cry8Kb1, Cry8Kb2, Cry8Kb3, Cry8La1, Cry8Ma1, Cry8Ma2, Cry8Ma3, Cry8Na1, Cry8Pa1, Cry8Pa2, Cry8Pa3, Cry8Qa1, Cry8Qa2, Cry8Ra1, Cry8Sa1, Cry8Ta1, Cry8-like, Cry8-like, Cry9Aa1, Cry9Aa2, Cry9Aa3, Cry9Aa4, Cry9Aa5, Cry9Aa, like, Cry9Ba1, Cry9Ba2, Cry9Bb1, Cry9Ca1, Cry9Ca2, Cry9Cb1, Cry9Da1, Cry9Da2, Cry9Da3, Cry9Da4, Cry9db1, Cry9Dc1, Cry9Ea1, Cry9Ea2, Cry9Ea3, Cry9Ea4, Cry9Ea5, Cry9Ea6, Cry9Ea7, Cry9Ea8, Cry9Ea9, Cry9Ea10, Cry9Ea11, Cry9Eb1, Cry9Eb2, Cry9Eb3, Cry9Ec1, Cry9Ed1, Cry9Ee1, Cry9Ee2, Cry9Fa1, Cry9Ga1, Cry9-like, Cry10Aa1, Cry10Aa2, Cry10Aa3, Cry10Aa4, Cry10A-like, Cry11Aa1, Cry11Aa2, Cry11Aa3, Cry11Aa4, Cry11Aa5, Cry11Aa-like, Cry11Ba1, Cry11Bb1, Cry11Bb2, Cry12Aa1, Cry13Aa1, Cry13Aa2, Cry14Aa1, Cry14Ab1, Cry15Aa1, Cry16Aa1, Cry17Aa1, Cry18Aa1, Cry18Ba1, Cry18Ca1, Cry19Aa1, Cry19Ba1, Cry19Ca1, Cry20Aa1, Cry20Ba1, Cry20Ba2, Cry20-like, Cry21Aa1, Cry21Aa2, Cry21Aa3, Cry21Ba1, Cry21Ca1, Cry21Ca2, Cry21Da1, Cry21Ea1, Cry21Fa1, Cry21Ga1, Cry21Ha1, Cry22Aa1, Cry22Aa2, Cry22Aa3, Cry22Ab1, Cry22Ab2, Cry22Ba1, Cry22Bb1, Cry23Aa1, Cry24Aa1, Cry24Ba1, Cry24Ca1, Cry24Da1, Cry25Aa1, Cry26Aa1, Cry27Aa1, Cry28Aa1, Cry28Aa2, Cry29Aa1, Cry29Ba1, Cry30Aa1, Cry30Ba1, Cry30Ca1, Cry30Ca2, Cry30Da1, Cry30db1, Cry30Ea1, Cry30Ea2, Cry30Ea3, Cry30Ea4, Cry30Fa1, Cry30Ga1, Cry30Ga2, Cry31Aa1, Cry31Aa2, Cry31Aa3, Cry31Aa4, Cry31Aa5, Cry31Aa6, Cry31Ab1, Cry31Ab2, Cry31Ac1, Cry31Ac2, Cry31Ad1, Cry31Ad2, Cry32Aa1, Cry32Aa2, Cry32Ab1, Cry32Ba1, Cry32Ca1, Cry32Cb1, Cry32Da1, Cry32Ea1, Cry32Ea2, Cry32Eb1, Cry32Fa1, Cry32Ga1, Cry32Ha1, Cry32Hb1, Cry32Ia1, Cry32Ja1, Cry32Ka1, Cry32La1, Cry32Ma1, Cry32Mb1, Cry32Na1, Cry32Oa1, Cry32Pa1, Cry32Qa1, Cry32Ra1, Cry32Sa1, Cry32Ta1, Cry32Ua1, Cry32Va1, Cry32Wa1, Cry32Wa2, Cry32Xa1, Cry32Ya1, Cry33Aa1, Cry34Aa1, Cry34Aa2, Cry34Aa3, Cry34Aa4, Cry34Ab1, Cry34Ac1, Cry34Ac2, Cry34Ac3, Cry34Ba1, Cry34Ba2, Cry34Ba3, Cry35Aa1, Cry35Aa2, Cry35Aa3, Cry35Aa4, Cry35Ab1, Cry35Ab2, Cry35Ab3, Cry35Ac1, Cry35Ba1, Cry35Ba2, Cry35Ba3, Cry36Aa1, Cry37Aa1, Cry38Aa1, Cry39Aa1, Cry40Aa1, Cry40Ba1, Cry40Ca1, Cry40Da1, Cry41Aa1, Cry41Ab1, Cry41Ba1, Cry41Ba2, Cry41Ca1, Cry42Aa1, Cry43Aa1, Cry43Aa2, Cry43Ba1, Cry43Ca1, Cry43Cb1, Cry43Cc1, Cry43-like, Cry44Aa1, Cry45Aa1, Cry45Ba1, Cry46Aa1, Cry46Aa2, Cry46Ab1, Cry47Aa1, Cry48Aa1, Cry48Aa2, Cry48Aa3, Cry48Ab1, Cry48Ab2, Cry49Aa1, Cry49Aa2, Cry49Aa3, Cry49Aa4, Cry49Ab1, Cry50Aa1, Cry50Ba1, Cry50Ba2, Cry51Aa1, Cry51Aa2, Cry52Aa1, Cry52Ba1, Cry52Ca1, Cry53Aa1, Cry53Ab1, Cry54Aa1, Cry54Aa2, Cry54Ab1, Cry54Ba1, Cry54Ba2, Cry55Aa1, Cry55Aa2, Cry55Aa3, Cry56Aa1, Cry56Aa2, Cry56Aa3, Cry56Aa4, Cry57Aa1, Cry57Ab1, Cry58Aa1, Cry59Ba1, Cry59Aa1, Cry60Aa1, Cry60Aa2, Cry60Aa3, Cry60Ba1, Cry60Ba2, Cry60Ba3, Cry61Aa1, Cry61Aa2, Cry61Aa3, Cry62Aa1, Cry63Aa1, Cry64Aa1, Cry64Ba1, Cry64Ca1, Cry65Aa1, Cry65Aa2, Cry66Aa1, Cry66Aa2, Cry67Aa1, Cry67Aa2, Cry68Aa1, Cry69Aa1, Cry69Aa2, Cry69Ab1, Cry70Aa1, Cry70Ba1, Cry70Bb1, Cry71Aa1, Cry72Aa1, Cry72Aa2, Cry73Aa1, Cry74Aa, Cry75Aa1, Cry75Aa2, Cry75Aa3, Cry76Aa1, Cry77Aa1, or Cry78Aa1, Cyt1Aa1, Cyt1Aa2, Cyt1Aa3, Cyt1Aa4, Cyt1Aa5, Cyt1Aa6, Cyt1Aa7, Cyt1Aa8, Cyt1Aa-like, Cyt1Ab1, Cyt1Ba1, Cyt1Ca1, Cyt1Da1, Cyt1Da2, Cyt2Aa1, Cyt2Aa2, Cyt2Aa3, Cyt2Aa4, Cyt2Ba1, Cyt2Ba2, Cyt2Ba3, Cyt2Ba4, Cyt2Ba5, Cyt2Ba6, Cyt2Ba7, Cyt2Ba8, Cyt2Ba9, Cyt2Ba10, Cyt2Ba11, Cyt2Ba12, Cyt2Ba13, Cyt2Ba14, Cyt2Ba15, Cyt2Ba16, Cyt2Ba-like, Cyt2Bb1, Cyt2Bc1, Cyt2B-like, Cyt2Ca1, and Cyt3Aa1.

[1306] In some embodiments, a combination or composition comprises, consists essentially of, or consists of: a U1-agatoxin-Ta1b Variant Polypeptide (TVP) having an amino acid sequence according to the amino acid sequence set forth in SEQ ID NO: 2, and a Cry toxin, or a Cyt toxin, wherein the Cry toxin or Cyt toxin has an amino acid sequence according to SEQ ID NOs: 412-481.

[1307] In some embodiments, a combination or composition comprises, consists essentially of, or consists of: a U1-agatoxin-Ta1b Variant Polypeptide (TVP) having an amino acid sequence according to the amino acid sequence set forth in SEQ ID NO: 2, and a Bt toxin, wherein the Bt toxin is a secreted protein.

[1308] In some embodiments, a combination or composition comprises, consists essentially of, or consists of: a U1-agatoxin-Ta1b Variant Polypeptide (TVP) having an amino acid sequence according to the amino acid sequence set forth in SEQ ID NO: 2, and a Bt toxin, wherein the Bt toxin is a secreted protein, wherein the secreted protein is a vegetative insecticidal protein (Vip), a secreted insecticidal protein (Sip), a Bin-like family protein, or an ETX_MTX2-family protein.

[1309] In some embodiments, a combination or composition comprises, consists essentially of, or consists of: a U1-agatoxin-Ta1b Variant Polypeptide (TVP) having an amino acid sequence according to the amino acid sequence set forth in SEQ ID NO: 2, and a Bt toxin, wherein the Bt toxin is a secreted protein, and wherein the secreted protein is a Vip.

[1310] In some embodiments, a combination or composition comprises, consists essentially of, or consists of: a U1-agatoxin-Ta1b Variant Polypeptide (TVP) having an amino acid sequence according to the amino acid sequence set forth in SEQ ID NO: 2, and a Vip, wherein the Vip is a Vip 1 family protein, a Vip 2 family protein, a Vip 3 family protein, or a Vip 4 family protein.

[1311] In some embodiments, a combination or composition comprises, consists essentially of, or consists of: a U1-agatoxin-Ta1b Variant Polypeptide (TVP) having an amino acid sequence according to the amino acid sequence set forth in SEQ ID NO: 2, and a Vip, wherein the Vip is selected from the group consisting of: Vip1Aa1, Vip1Aa2, Vip1Aa3, Vip1Ab1, Vip1Ac1, Vip1Ad1, Vip1Ba1, Vip1Ba2, Vip1Bb1, Vip1Bb2, Vip1Bb3, Vip1Bc1, Vip1Ca1, Vip1Ca2, Vip1Da1, Vip2Aa1, Vip2Aa2, Vip2Aa3, Vip2Ab1, Vip2Ac1, Vip2Ac2, Vip2Ad1, Vip2Ae1, Vip2Ae2, Vip2Ae3, Vip2Af1, Vip2Af2, Vip2Ag1, Vip2Ag2, Vip2Ba1, Vip2Ba2, Vip2Bb1, Vip2Bb2, Vip2Bb3, Vip2Bb4, Vip3Aa1, Vip3Aa2, Vip3Aa3, Vip3Aa4, Vip3Aa5, Vip3Aa6, Vip3Aa7, Vip3Aa8, Vip3Aa9, Vip3Aa10, Vip3Aa11, Vip3Aa12, Vip3Aa13, Vip3Aa14, Vip3Aa15, Vip3Aa16, Vip3Aa17, Vip3Aa18, Vip3Aa19.0, Vip3Aa19, Vip3Aa20, Vip3Aa21, Vip3Aa22, Vip3Aa23, Vip3Aa24, Vip3Aa25, Vip3Aa26, Vip3Aa27, Vip3Aa28, Vip3Aa29, Vip3Aa30, Vip3Aa31, Vip3Aa32, Vip3Aa33, Vip3Aa34, Vip3Aa35, Vip3Aa36, Vip3Aa37, Vip3Aa38, Vip3Aa39, Vip3Aa40, Vip3Aa41, Vip3Aa42, Vip3Aa43, Vip3Aa44, Vip3Aa45, Vip3Aa46, Vip3Aa47, Vip3Aa48, Vip3Aa49, Vip3Aa50, Vip3Aa51, Vip3Aa52, Vip3Aa53, Vip3Aa54, Vip3Aa55, Vip3Aa56, Vip3Aa57, Vip3Aa58, Vip3Aa59, Vip3Aa60, Vip3Aa61, Vip3Aa62, Vip3Aa63, Vip3Aa64, Vip3Aa65, Vip3Aa66, Vip3Ab1, Vip3Ab2, Vip3Ac1, Vip3Ad1, Vip3Ad2, Vip3Ad3, Vip3Ad4, Vip3Ad5, Vip3Ad6, Vip3Ae1, Vip3Af1, Vip3Af2, Vip3Af3, Vip3Af4, Vip3Ag1, Vip3Ag2, Vip3Ag3, Vip3Ag4, Vip3Ag5, Vip3Ag6, Vip3Ag7, Vip3Ag8, Vip3Ag9, Vip3Ag10, Vip3Ag11, Vip3Ag12, Vip3Ag13, Vip3Ag14, Vip3Ag15, Vip3Ah1, Vip3Ah2, Vip3Ai1, Vip3Aj1, Vip3Aj2, Vip3Ba1, Vip3Ba2, Vip3Bb1, Vip3Bb2, Vip3Bb3, Vip3Bc, Vip3Ca1, Vip3Ca2, Vip3Ca3, Vip3Ca4, and Vip4Aa1.

[1312] In some embodiments, a combination or composition comprises, consists essentially of, or consists of: a U1-agatoxin-Ta1b Variant Polypeptide (TVP) having an amino acid sequence according to the amino acid sequence set forth in SEQ ID NO: 2, and a Vip, wherein the Vip protein has an amino acid sequence according to the amino acid sequence set forth in SEQ ID NOs: 482-587.

[1313] In some embodiments, a combination or composition comprises, consists essentially of, or consists of: one or more fermentation solids, spores, or toxins isolated from a Bacillus thuringiensis ssp. kurstaki strain EVB-113-19; a Bacillus thuringiensis ssp. tenebrionis strain NB-176; or a Bacillus thuringiensis ssp. israelensis strain BMP 144; and a U1-agatoxin-Ta1b Variant Polypeptide (TVP) having an amino acid sequence according to the amino acid sequence set forth in SEQ ID NO: 2.

[1314] In some embodiments, a combination or composition comprises, consists essentially of, or consists of: one or more fermentation solids, spores, or toxins isolated from a Bacillus thuringiensis ssp. kurstaki strain EVB-113-19, and a U1-agatoxin-Ta1b Variant Polypeptide (TVP) having an amino acid sequence according to the amino acid sequence set forth in SEQ ID NO: 2.

[1315] In some embodiments, a combination or composition comprises, consists essentially of, or consists of: one or more fermentation solids, spores, or toxins isolated from a Bacillus thuringiensis ssp. kurstaki strain EVB-113-19; a Bacillus thuringiensis ssp.

[1316] tenebrionis strain NB-176; or a Bacillus thuringiensis ssp. israelensis strain BMP 144; and a U1-agatoxin-Ta1b Variant Polypeptide (TVP) having an amino acid sequence according to the amino acid sequence set forth in SEQ ID NO: 51.

[1317] In some embodiments, a combination or composition comprises, consists essentially of, or consists of: one or more fermentation solids, spores, or toxins isolated from a Bacillus thuringiensis ssp. kurstaki strain EVB-113-19, and a U1-agatoxin-Ta1b Variant Polypeptide (TVP) having an amino acid sequence according to the amino acid sequence set forth in SEQ ID NO: 51.

[1318] In some embodiments, a combination or composition comprises, consists essentially of, or consists of: a U1-agatoxin-Ta1b Variant Polypeptide (TVP) having an amino acid sequence according to the amino acid sequence set forth in SEQ ID NO: 2, and one or more fermentation solids, spores, or toxins isolated from a Bacillus thuringiensis ssp. kurstaki strain EVB-113-19, wherein the combination or composition comprises a concentration of U1-agatoxin-Ta1b Variant Polypeptide (TVP) having an amino acid sequence according to the amino acid sequence set forth in SEQ ID NO: 2 ranging from about 0.0001% w/w, 0.0005% w/w, 0.001% w/w, 0.005% w/w, 0.01% w/w, 0.02% w/w, 0.03% w/w, 0.04% w/w, 0.05% w/w, 0.06% w/w, 0.07% w/w, 0.08% w/w, 0.09% w/w, 0.1% w/w, 0.2% w/w, 0.3% w/w, 0.4% w/w, 0.5% w/w, 0.6% w/w, 0.7% w/w, 0.8% w/w, 0.9% w/w, 1% w/w, 2% w/w, 3% w/w, 4% w/w, 5% w/w, 6% w/w, 7% w/w, 8% w/w, 9% w/w, 10% w/w, 11% w/w, 12% w/w, 13% w/w, 14% w/w, 15% w/w, 16% w/w, 17% w/w, 18% w/w, 19% w/w, 20% w/w, 21% w/w, 22% w/w, 23% w/w, 24% w/w, 25% w/w, 26% w/w, 27% w/w, 28% w/w, 29% w/w, 30% w/w, 31% w/w, 32% w/w, 33% w/w, 34% w/w, 35% w/w, 36% w/w, 37% w/w, 38% w/w, 39% w/w, 40% w/w, 41% w/w, 42% w/w, 43% w/w, 44% w/w, 45% w/w, 46% w/w, 47% w/w, 48% w/w, 49% w/w, 50% w/w, 51% w/w, 52% w/w, 53% w/w, 54% w/w, 55% w/w, 56% w/w, 57% w/w, 58% w/w, 59% w/w, 60% w/w, 61% w/w, 62% w/w, 63% w/w, 64% w/w, 65% w/w, 66% w/w, 67% w/w, 68% w/w, 69% w/w, 70% w/w, 71% w/w, 72% w/w, 73% w/w, 74% w/w, 75% w/w, 76% w/w, 77% w/w, 78% w/w, 79% w/w, 80% w/w, 81% w/w, 82% w/w, 83% w/w, 84% w/w, 85% w/w, 86% w/w, 87% w/w, 88% w/w, 89% w/w, 90% w/w, 91% w/w, 92% w/w, 93% w/w, 94% w/w, 95% w/w, 96% w/w, 97% w/w, 98% w/w, 99% w/w, 99.1% w/w, 99.2% w/w, 99.3% w/w, 99.4% w/w, 99.5% w/w, 99.6% w/w, 99.7% w/w, 99.8% w/w, or about 99.9% w/w of the total composition.

[1319] In some embodiments, a combination or composition comprises, consists essentially of, or consists of: a U1-agatoxin-Ta1b Variant Polypeptide (TVP) having an amino acid sequence according to the amino acid sequence set forth in SEQ ID NO: 51, and one or more fermentation solids, spores, or toxins isolated from a Bacillus thuringiensis ssp. kurstaki strain EVB-113-19, wherein the combination or composition comprises a concentration of U1-agatoxin-Ta1b Variant Polypeptide (TVP) having an amino acid sequence according to the amino acid sequence set forth in SEQ ID NO: 51 ranging from about 0.0001% w/w, 0.0005% w/w, 0.001% w/w, 0.005% w/w, 0.01% w/w, 0.02% w/w, 0.03% w/w, 0.04% w/w, 0.05% w/w, 0.06% w/w, 0.07% w/w, 0.08% w/w, 0.09% w/w, 0.1% w/w, 0.2% w/w, 0.3% w/w, 0.4% w/w, 0.5% w/w, 0.6% w/w, 0.7% w/w, 0.8% w/w, 0.9% w/w, 1% w/w, 2% w/w, 3% w/w, 4% w/w, 5% w/w, 6% w/w, 7% w/w, 8% w/w, 9% w/w, 10% w/w, 11% w/w, 12% w/w, 13% w/w, 14% w/w, 15% w/w, 16% w/w, 17% w/w, 18% w/w, 19% w/w, 20% w/w, 21% w/w, 22% w/w, 23% w/w, 24% w/w, 25% w/w, 26% w/w, 27% w/w, 28% w/w, 29% w/w, 30% w/w, 31% w/w, 32% w/w, 33% w/w, 34% w/w, 35% w/w, 36% w/w, 37% w/w, 38% w/w, 39% w/w, 40% w/w, 41% w/w, 42% w/w, 43% w/w, 44% w/w, 45% w/w, 46% w/w, 47% w/w, 48% w/w, 49% w/w, 50% w/w, 51% w/w, 52% w/w, 53% w/w, 54% w/w, 55% w/w, 56% w/w, 57% w/w, 58% w/w, 59% w/w, 60% w/w, 61% w/w, 62% w/w, 63% w/w, 64% w/w, 65% w/w, 66% w/w, 67% w/w, 68% w/w, 69% w/w, 70% w/w, 71% w/w, 72% w/w, 73% w/w, 74% w/w, 75% w/w, 76% w/w, 77% w/w, 78% w/w, 79% w/w, 80% w/w, 81% w/w, 82% w/w, 83% w/w, 84% w/w, 85% w/w, 86% w/w, 87% w/w, 88% w/w, 89% w/w, 90% w/w, 91% w/w, 92% w/w, 93% w/w, 94% w/w, 95% w/w, 96% w/w, 97% w/w, 98% w/w, 99% w/w, 99.1% w/w, 99.2% w/w, 99.3% w/w, 99.4% w/w, 99.5% w/w, 99.6% w/w, 99.7% w/w, 99.8% w/w, or about 99.9% w/w of the total composition.

[1320] In some embodiments, a combination or composition comprises, consists essentially of, or consists of: a U1-agatoxin-Ta1b Variant Polypeptide (TVP) having an amino acid sequence according to the amino acid sequence set forth in SEQ ID NO: 2, and one or more fermentation solids, spores, or toxins isolated from a Bacillus thuringiensis ssp. kurstaki strain EVB-113-19, wherein the combination or composition comprises a concentration of one or more fermentation solids, spores, or toxins isolated from a Bacillus thuringiensis ssp. kurstaki strain EVB-113-19 ranging from about 0.0001% w/w, 0.0005% w/w, 0.001% w/w, 0.005% w/w, 0.01% w/w, 0.02% w/w, 0.03% w/w, 0.04% w/w, 0.05% w/w, 0.06% w/w, 0.07% w/w, 0.08% w/w, 0.09% w/w, 0.1% w/w, 0.2% w/w, 0.3% w/w, 0.4% w/w, 0.5% w/w, 0.6% w/w, 0.7% w/w, 0.8% w/w, 0.9% w/w, 1% w/w, 2% w/w, 3% w/w, 4% w/w, 5% w/w, 6% w/w, 7% w/w, 8% w/w, 9% w/w, 10% w/w, 11% w/w, 12% w/w, 13% w/w, 14% w/w, 15% w/w, 16% w/w, 17% w/w, 18% w/w, 19% w/w, 20% w/w, 21% w/w, 22% w/w, 23% w/w, 24% w/w, 25% w/w, 26% w/w, 27% w/w, 28% w/w, 29% w/w, 30% w/w, 31% w/w, 32% w/w, 33% w/w, 34% w/w, 35% w/w, 36% w/w, 37% w/w, 38% w/w, 39% w/w, 40% w/w, 41% w/w, 42% w/w, 43% w/w, 44% w/w, 45% w/w, 46% w/w, 47% w/w, 48% w/w, 49% w/w, 50% w/w, 51% w/w, 52% w/w, 53% w/w, 54% w/w, 55% w/w, 56% w/w, 57% w/w, 58% w/w, 59% w/w, 60% w/w, 61% w/w, 62% w/w, 63% w/w, 64% w/w, 65% w/w, 66% w/w, 67% w/w, 68% w/w, 69% w/w, 70% w/w, 71% w/w, 72% w/w, 73% w/w, 74% w/w, 75% w/w, 76% w/w, 77% w/w, 78% w/w, 79% w/w, 80% w/w, 81% w/w, 82% w/w, 83% w/w, 84% w/w, 85% w/w, 86% w/w, 87% w/w, 88% w/w, 89% w/w, 90% w/w, 91% w/w, 92% w/w, 93% w/w, 94% w/w, 95% w/w, 96% w/w, 97% w/w, 98% w/w, 99% w/w, 99.1% w/w, 99.2% w/w, 99.3% w/w, 99.4% w/w, 99.5% w/w, 99.6% w/w, 99.7% w/w, 99.8% w/w, or about 99.9% w/w of the total composition.

[1321] In some embodiments, a combination or composition comprises, consists essentially of, or consists of: a U1-agatoxin-Ta1b Variant Polypeptide (TVP) having an amino acid sequence according to the amino acid sequence set forth in SEQ ID NO: 51, and one or more fermentation solids, spores, or toxins isolated from a Bacillus thuringiensis ssp. kurstaki strain EVB-113-19, wherein the combination or composition comprises a concentration of one or more fermentation solids, spores, or toxins isolated from a Bacillus thuringiensis ssp. kurstaki strain EVB-113-19 ranging from about 0.0001% w/w, 0.0005% w/w, 0.001% w/w, 0.005% w/w, 0.01% w/w, 0.02% w/w, 0.03% w/w, 0.04% w/w, 0.05% w/w, 0.06% w/w, 0.07% w/w, 0.08% w/w, 0.09% w/w, 0.1% w/w, 0.2% w/w, 0.3% w/w, 0.4% w/w, 0.5% w/w, 0.6% w/w, 0.7% w/w, 0.8% w/w, 0.9% w/w, 1% w/w, 2% w/w, 3% w/w, 4% w/w, 5% w/w, 6% w/w, 7% w/w, 8% w/w, 9% w/w, 10% w/w, 11% w/w, 12% w/w, 13% w/w, 14% w/w, 15% w/w, 16% w/w, 17% w/w, 18% w/w, 19% w/w, 20% w/w, 21% w/w, 22% w/w, 23% w/w, 24% w/w, 25% w/w, 26% w/w, 27% w/w, 28% w/w, 29% w/w, 30% w/w, 31% w/w, 32% w/w, 33% w/w, 34% w/w, 35% w/w, 36% w/w, 37% w/w, 38% w/w, 39% w/w, 40% w/w, 41% w/w, 42% w/w, 43% w/w, 44% w/w, 45% w/w, 46% w/w, 47% w/w, 48% w/w, 49% w/w, 50% w/w, 51% w/w, 52% w/w, 53% w/w, 54% w/w, 55% w/w, 56% w/w, 57% w/w, 58% w/w, 59% w/w, 60% w/w, 61% w/w, 62% w/w, 63% w/w, 64% w/w, 65% w/w, 66% w/w, 67% w/w, 68% w/w, 69% w/w, 70% w/w, 71% w/w, 72% w/w, 73% w/w, 74% w/w, 75% w/w, 76% w/w, 77% w/w, 78% w/w, 79% w/w, 80% w/w, 81% w/w, 82% w/w, 83% w/w, 84% w/w, 85% w/w, 86% w/w, 87% w/w, 88% w/w, 89% w/w, 90% w/w, 91% w/w, 92% w/w, 93% w/w, 94% w/w, 95% w/w, 96% w/w, 97% w/w, 98% w/w, 99% w/w, 99.1% w/w, 99.2% w/w, 99.3% w/w, 99.4% w/w, 99.5% w/w, 99.6% w/w, 99.7% w/w, 99.8% w/w, or about 99.9% w/w of the total composition.

[1322] Combinations: Exemplary Combinations of Bt Toxins and AVPs

[1323] In some embodiments, a combination or composition comprises, consists essentially of, or consists of: an Av3-Variant Polypeptide (AVP) having an amino acid sequence according to the amino acid sequence set forth in SEQ ID NO: 67, and a bacterial toxin, wherein the bacterial toxin is a Bacillus thuringiensis (Bt) toxin.

[1324] In some embodiments, a combination or composition comprises, consists essentially of, or consists of: an Av3-Variant Polypeptide (AVP) having an amino acid sequence according to the amino acid sequence set forth in SEQ ID NO: 67, and a Bt toxin, wherein the Bt toxin is one or more fermentation solids, spores, or toxins isolated from the group consisting of: Bacillus thuringiensis var. kurstaki (Btk); Bacillus thuringiensis var. tenebrionis (Btt); Bacillus thuringiensis var. israelensis (Bti); Bacillus thuringiensis var. aizawai; Bacillus thuringiensis var. aizawai/pacificus; Bacillus thuringiensis var. alesti; Bacillus thuringiensis var. amagiensis; Bacillus thuringiensis var. andalousiensis; Bacillus thuringiensis var. argentinensis; Bacillus thuringiensis var. asturiensis; Bacillus thuringiensis var. azorensis; Bacillus thuringiensis var. balearica; Bacillus thuringiensis var. berliner; Bacillus thuringiensis var. bolivia; Bacillus thuringiensis var. brasilensis; Bacillus thuringiensis var. cameroun; Bacillus thuringiensis var. canadensis; Bacillus thuringiensis var. chanpaisis; Bacillus thuringiensis var. chinensis; Bacillus thuringiensis var. colmeri; Bacillus thuringiensis var. coreanensis; Bacillus thuringiensis var. dakota; Bacillus thuringiensis var. darmstadiensis; Bacillus thuringiensis var. dendrolimus; Bacillus thuringiensis var. entomocidus; Bacillus thuringiensis var. entomocidus/subtoxicus; Bacillus thuringiensis var. finitimus; Bacillus thuringiensis var. fukuokaensis; Bacillus thuringiensis var. galechiae; Bacillus thuringiensis var. galleriae; Bacillus thuringiensis var. graciosensis; Bacillus thuringiensis var. guiyangiensis; Bacillus thuringiensis var. higo; Bacillus thuringiensis var. huazhongensis; Bacillus thuringiensis var. iberica; Bacillus thuringiensis var. indiana; Bacillus thuringiensis var. israelensis/tochigiensis; Bacillus thuringiensis var. japonensis; Bacillus thuringiensis var. jegathesan; Bacillus thuringiensis var. jinghongiensis; Bacillus thuringiensis var. kenyae; Bacillus thuringiensis var. kim; Bacillus thuringiensis var. kumamtoensis; Bacillus thuringiensis var. kunthalanags3; Bacillus thuringiensis var. kunthalaRX24; Bacillus thuringiensis var. kunthalaRX2 7; Bacillus thuringiensis var. kunthalaRX28; Bacillus thuringiensis var. kyushuensis; Bacillus thuringiensis var. leesis; Bacillus thuringiensis var. londrina; Bacillus thuringiensis var. malayensis; Bacillus thuringiensis var. medellin; Bacillus thuringiensis var. mexicanensis; Bacillus thuringiensis var. mogi; Bacillus thuringiensis var. monterrey; Bacillus thuringiensis var. morrisoni; Bacillus thuringiensis var. muju; Bacillus thuringiensis var. navarrensis; Bacillus thuringiensis var. neoleonensis; Bacillus thuringiensis var. nigeriensis; Bacillus thuringiensis var. novosibirsk; Bacillus thuringiensis var. ostriniae; Bacillus thuringiensis var. oswaldocruzi; Bacillus thuringiensis var. pahangi; Bacillus thuringiensis var. pakistani; Bacillus thuringiensis var. palmanyolensis; Bacillus thuringiensis var. pingluonsis; Bacillus thuringiensis var. pirenaica; Bacillus thuringiensis var. poloniensis; Bacillus thuringiensis var. pondicheriensis; Bacillus thuringiensis var. pulsiensis; Bacillus thuringiensis var. rongseni; Bacillus thuringiensis var. roskildiensis; Bacillus thuringiensis var. san diego; Bacillus thuringiensis var. seoulensis; Bacillus thuringiensis var. shandongiensis; Bacillus thuringiensis var. silo; Bacillus thuringiensis var. sinensis; Bacillus thuringiensis var. sooncheon; Bacillus thuringiensis var. sotto; Bacillus thuringiensis var. sotto/dendrolimus; Bacillus thuringiensis var. subtoxicus; Bacillus thuringiensis var. sumiyoshiensis; Bacillus thuringiensis var. sylvestriensis; Bacillus thuringiensis var. thailandensis; Bacillus thuringiensis var. thompsoni; Bacillus thuringiensis var. thuringiensis; Bacillus thuringiensis var. tochigiensis; Bacillus thuringiensis var. toguchini; Bacillus thuringiensis var. tohokuensis; Bacillus thuringiensis var. tolworthi; Bacillus thuringiensis var. toumanoffi; Bacillus thuringiensis var. vazensis; Bacillus thuringiensis var. wratislaviensis; Bacillus thuringiensis var. wuhanensis; Bacillus thuringiensis var. xiaguangiensis; Bacillus thuringiensis var. yosoo; Bacillus thuringiensis var. yunnanensis; Bacillus thuringiensis var. zhaodongensis; and Bacillus thuringiensis var. konkukian toxin.

[1325] In some embodiments, a combination or composition comprises, consists essentially of, or consists of: an Av3-Variant Polypeptide (AVP) having an amino acid sequence according to the amino acid sequence set forth in SEQ ID NO: 67, and a Bt toxin, wherein the Bt toxin is one or more fermentation solids, spores, or toxins isolated from the group consisting of: Bacillus thuringiensis var. kurstaki (Btk); Bacillus thuringiensis var. tenebrionis (Btt); and Bacillus thuringiensis var. israelensis (Bti).

[1326] In some embodiments, a combination or composition comprises, consists essentially of, or consists of: an Av3-Variant Polypeptide (AVP) having an amino acid sequence according to the amino acid sequence set forth in SEQ ID NO: 67, and a Bt toxin, wherein the Bt toxin is a parasporal crystal toxin, a secreted protein, a β-exotoxin, a 41.9-kDa insecticidal toxin, a sphaericolysin, an alveolysin, or an enhancin-like protein.

[1327] In some embodiments, a combination or composition comprises, consists essentially of, or consists of: an Av3-Variant Polypeptide (AVP) having an amino acid sequence according to the amino acid sequence set forth in SEQ ID NO: 67, and a parasporal crystal toxin, wherein the parasporal crystal toxin is a δ-endotoxin.

[1328] In some embodiments, a combination or composition comprises, consists essentially of, or consists of: an Av3-Variant Polypeptide (AVP) having an amino acid sequence according to the amino acid sequence set forth in SEQ ID NO: 67, and a 6-endotoxin, wherein the δ-endotoxin is a Three-domain (3D) Cry family protein, a binary Bin-like family toxin, an ETX_MTX2-like family toxin, a Toxin-10 family toxin, an Aerolysin family toxin, or a cytolysin.

[1329] In some embodiments, a combination or composition comprises, consists essentially of, or consists of: an Av3-Variant Polypeptide (AVP) having an amino acid sequence according to the amino acid sequence set forth in SEQ ID NO: 67, and a 6-endotoxin, wherein the δ-endotoxin is a Three-domain (3D) Cry toxin, a mosquitocidal Cry toxin (Mtx), a binary-like (Bin) toxin, or a Cyt toxin.

[1330] In some embodiments, a combination or composition comprises, consists essentially of, or consists of: an Av3-Variant Polypeptide (AVP) having an amino acid sequence according to the amino acid sequence set forth in SEQ ID NO: 67, and a 6-endotoxin, wherein the δ-endotoxin is a Three-domain (3D) Cry toxin or a Cyt toxin.

[1331] In some embodiments, a combination or composition comprises, consists essentially of, or consists of: an Av3-Variant Polypeptide (AVP) having an amino acid sequence according to the amino acid sequence set forth in SEQ ID NO: 67, and a 6-endotoxin, wherein the δ-endotoxin is selected from the group consisting of: Cry1Aa1, Cry1Aa2, Cry1Aa3, Cry1Aa4, Cry1Aa5, Cry1Aa6, Cry1Aa7, Cry1Aa8, Cry1Aa9, Cry1Aa10, Cry1Aa11, Cry1Aa12, Cry1Aa13, Cry1Aa14, Cry1Aa15, Cry1Aa16, Cry1Aa17, Cry1Aa18, Cry1Aa19, Cry1Aa20, Cry1Aa21, Cry1Aa22, Cry1Aa23, Cry1Aa24, Cry1Aa25, Cry1Ab1, Cry1Ab2, Cry1Ab3, Cry1Ab4, Cry1Ab5, Cry1Ab6, Cry1Ab7, Cry1Ab8, Cry1Ab9, Cry1Ab10, Cry1Ab11, Cry1Ab12, Cry1Ab13, Cry1Ab14, Cry1Ab15, Cry1Ab16, Cry1Ab17, Cry1Ab18, Cry1Ab19, Cry1Ab20, Cry1Ab21, Cry1Ab22, Cry1Ab23, Cry1Ab24, Cry1Ab25, Cry1Ab26, Cry1Ab27, Cry1Ab28, Cry1Ab29, Cry1Ab30, Cry1Ab31, Cry1Ab32, Cry1Ab33, Cry1Ab34, Cry1Ab35, Cry1Ab36, Cry1Ab-like, Cry1Ab-like, Cry1Ab-like, Cry1Ab-like, Cry1Ac1, Cry1Ac2, Cry1Ac3, Cry1Ac4, Cry1Ac5, Cry1Ac6, Cry1Ac7, Cry1Ac8, Cry1Ac9, Cry1Ac10, Cry1Ac11, Cry1Ac12, Cry1Ac13, Cry1Ac14, Cry1Ac15, Cry1Ac16, Cry1Ac17, Cry1Ac18, Cry1Ac19, Cry1Ac20, Cry1Ac21, Cry1Ac22, Cry1Ac23, Cry1Ac24, Cry1Ac25, Cry1Ac26, Cry1Ac27, Cry1Ac28, Cry1Ac29, Cry1Ac30, Cry1Ac31, Cry1Ac32, Cry1Ac33, Cry1Ac34, Cry1Ac35, Cry1Ac36, Cry1Ac37, Cry1Ac38, Cry1Ac39, Cry1Ad1, Cry1Ad2, Cry1Ae1, Cry1Af1, Cry1Ag1, Cry1Ah1, Cry1Ah2, Cry1Ah3, Cry1Ai1, Cry1Ai2, Cry1Aj1, Cry1A-like, Cry1Ba1, Cry1Ba2, Cry1Ba3, Cry1Ba4, Cry1Ba5, Cry1Ba6, Cry1Ba7, Cry1Ba8, Cry1Bb1, Cry1Bb2, Cry1Bb3, Cry1Bc1, Cry1Bd1, Cry1Bd2, Cry1Bd3, Cry1Be1, Cry1Be2, Cry1Be3, Cry1Be4, Cry1Be5, Cry1Bf1, Cry1Bf2, Cry1Bg1, Cry1Bh1, Cry1Bi1, Cry1Bj1, Cry1Ca1, Cry1Ca2, Cry1Ca3, Cry1Ca4, Cry1Ca5, Cry1Ca6, Cry1Ca7, Cry1Ca8, Cry1Ca9, Cry1Ca10, Cry1Ca11, Cry1Ca12, Cry1Ca13, Cry1Ca14, Cry1Ca15, Cry1Cb1, Cry1Cb2, Cry1Cb3, Cry1Cb-like, Cry1Da1, Cry1Da2, Cry1Da3, Cry1Da4, Cry1Da5, Cry1db1, Cry1db2, Cry1Dc1, Cry1Dd1, Cry1Ea1, Cry1Ea2, Cry1Ea3, Cry1Ea4, Cry1Ea5, Cry1Ea6, Cry1Ea7, Cry1Ea8, Cry1Ea9, Cry1Ea10, Cry1Ea11, Cry1Ea12, Cry1Eb1, Cry1Fa1, Cry1Fa2, Cry1Fa3, Cry1Fa4, Cry1Fb1, Cry1Fb2, Cry1Fb3, Cry1Fb4, Cry1Fb5, Cry1Fb6, Cry1Fb7, Cry1Ga1, Cry1Ga2, Cry1Gb1, Cry1Gb2, Cry1Gc1, Cry1Ha1, Cry1Hb1, Cry1Hb2, Cry1Hc1, Cry1H-like, Cry1Ia1, Cry1Ia2, Cry1Ia3, Cry1Ia4, Cry1Ia5, Cry1Ia6, Cry1Ia7, Cry1Ia8, Cry1Ia9, Cry1Ia10, Cry1Ia11, Cry1Ia12, Cry1Ia13, Cry1Ia14, Cry1Ia15, Cry1Ia16, Cry1Ia17, Cry1Ia18, Cry1Ia19, Cry1Ia20, Cry1Ia21, Cry1Ia22, Cry1Ia23, Cry1Ia24, Cry1Ia25, Cry1Ia26, Cry1Ia27, Cry1Ia28, Cry1Ia29, Cry1Ia30, Cry1Ia31, Cry1Ia32, Cry1Ia33, Cry1Ia34, Cry1Ia35, Cry1Ia36, Cry1Ia37, Cry1Ia38, Cry1Ia39, Cry1Ia40, Cry1Ib1, Cry1Ib2, Cry1Ib3, Cry1Ib4, Cry1Ib5, Cry1Ib6, Cry1Ib7, Cry1Ib8, Cry1Ib9, Cry1Ib10, Cry1Ib11, Cry1Ic1, Cry1Ic2, Cry1Id1, Cry1Id2, Cry1Id3, Cry1Ie1, Cry1Ie2, Cry1Ie3, Cry1Ie4, Cry1Ie5, Cry1If1, Cry1Ig1, Cry1I-like, Cry1I-like, Cry1Ja1, Cry1Ja2, Cry1Ja3, Cry1Jb1, Cry1Jc1, Cry1Jc2, Cry1Jd1, Cry1Ka1, Cry1Ka2, Cry1La1, Cry1La2, Cry1La3, Cry1Ma1, Cry1Ma2, Cry1Na1, Cry1Na2, Cry1Na3, Cry1Nb1, Cry1-like, Cry2Aa1, Cry2Aa2, Cry2Aa3, Cry2Aa4, Cry2Aa5, Cry2Aa6, Cry2Aa7, Cry2Aa8, Cry2Aa9, Cry2Aa10, Cry2Aa11, Cry2Aa12, Cry2Aa13, Cry2Aa14, Cry2Aa15, Cry2Aa16, Cry2Aa17, Cry2Aa18, Cry2Aa19, Cry2Aa20, Cry2Aa21, Cry2Aa22, Cry2Aa23, Cry2Aa23, Cry2Aa25, Cry2Ab1, Cry2Ab2, Cry2Ab3, Cry2Ab4, Cry2Ab5, Cry2Ab6, Cry2Ab7, Cry2Ab8, Cry2Ab9, Cry2Ab10, Cry2Ab11, Cry2Ab12, Cry2Ab13, Cry2Ab14, Cry2Ab15, Cry2Ab16, Cry2Ab17, Cry2Ab18, Cry2Ab19, Cry2Ab20, Cry2Ab21, Cry2Ab22, Cry2Ab23, Cry2Ab24, Cry2Ab25, Cry2Ab26, Cry2Ab27, Cry2Ab28, Cry2Ab29, Cry2Ab30, Cry2Ab31, Cry2Ab32, Cry2Ab33, Cry2Ab34, Cry2Ab35, Cry2Ab36, Cry2Ac1, Cry2Ac2, Cry2Ac3, Cry2Ac4, Cry2Ac5, Cry2Ac6, Cry2Ac7, Cry2Ac8, Cry2Ac9, Cry2Ac10, Cry2Ac11, Cry2Ac12, Cry2Ad1, Cry2Ad2, Cry2Ad3, Cry2Ad4, Cry2Ad5, Cry2Ae1, Cry2Af1, Cry2Af2, Cry2Ag1, Cry2Ah1, Cry2Ah2, Cry2Ah3, Cry2Ah4, Cry2Ah5, Cry2Ah6, Cry2Ai1, Cry2Aj1, Cry2Ak1, Cry2A11, Cry2Ba1, Cry2Ba2, Cry3Aa1, Cry3Aa2, Cry3Aa3, Cry3Aa4, Cry3Aa5, Cry3Aa6, Cry3Aa7, Cry3Aa8, Cry3Aa9, Cry3Aa10, Cry3Aa11, Cry3Aa12, Cry3Ba1, Cry3Ba2, Cry3Ba3, Cry3Bb1, Cry3Bb2, Cry3Bb3, Cry3Ca1, Cry4Aa1, Cry4Aa2, Cry4Aa3, Cry4Aa4, Cry4A-like, Cry4Ba1, Cry4Ba2, Cry4Ba3, Cry4Ba4, Cry4Ba5, Cry4Ba-like, Cry4Ca1, Cry4Ca2, Cry4Cb1, Cry4Cb2, Cry4Cb3, Cry4Cc1, Cry5Aa1, Cry5Ab1, Cry5Ac1, Cry5Ad1, Cry5Ba1, Cry5Ba2, Cry5Ba3, Cry5Ca1, Cry5Ca2, Cry5Da1, Cry5Da2, Cry5Ea1, Cry5Ea2, Cry6Aa1, Cry6Aa2, Cry6Aa3, Cry6Ba1, Cry7Aa1, Cry7Aa2, Cry7Ab1, Cry7Ab2, Cry7Ab3, Cry7Ab4, Cry7Ab5, Cry7Ab6, Cry7Ab7, Cry7Ab8, Cry7Ab9, Cry7Ac1, Cry7Ba1, Cry7Bb1, Cry7Ca1, Cry7Cb1, Cry7Da1, Cry7Da2, Cry7Da3, Cry7Ea1, Cry7Ea2, Cry7Ea3, Cry7Fa1, Cry7Fa2, Cry7Fb1, Cry7Fb2, Cry7Fb3, Cry7Ga1, Cry7Ga2, Cry7Gb1, Cry7Gc1, Cry7Gd1, Cry7Ha1, Cry7Ia1, Cry7Ja1, Cry7Ka1, Cry7Kb1, Cry7La1, Cry8Aa1, Cry8Ab1, Cry8Ac1, Cry8Ad1, Cry8Ba1, Cry8Bb1, Cry8Bc1, Cry8Ca1, Cry8Ca2, Cry8Ca3, Cry8Ca4, Cry8Ca5, Cry8Da1, Cry8Da2, Cry8Da3, Cry8db1, Cry8Ea1, Cry8Ea2, Cry8Ea3, Cry8Ea4, Cry8Ea5, Cry8Ea6, Cry8Fa1, Cry8Fa2, Cry8Fa3, Cry8Fa4, Cry8Ga1, Cry8Ga2, Cry8Ga3, Cry8Ha1, Cry8Hb1, Cry8Ia1, Cry8Ia2, Cry8Ia3, Cry8Ia4, Cry8Ib1, Cry8Ib2, Cry8Ib3, Cry8Ja1, Cry8Ka1, Cry8Ka2, Cry8Ka3, Cry8Kb1, Cry8Kb2, Cry8Kb3, Cry8La1, Cry8Ma1, Cry8Ma2, Cry8Ma3, Cry8Na1, Cry8Pa1, Cry8Pa2, Cry8Pa3, Cry8Qa1, Cry8Qa2, Cry8Ra1, Cry8Sa1, Cry8Ta1, Cry8-like, Cry8-like, Cry9Aa1, Cry9Aa2, Cry9Aa3, Cry9Aa4, Cry9Aa5, Cry9Aa, like, Cry9Ba1, Cry9Ba2, Cry9Bb1, Cry9Ca1, Cry9Ca2, Cry9Cb1, Cry9Da1, Cry9Da2, Cry9Da3, Cry9Da4, Cry9db1, Cry9Dc1, Cry9Ea1, Cry9Ea2, Cry9Ea3, Cry9Ea4, Cry9Ea5, Cry9Ea6, Cry9Ea7, Cry9Ea8, Cry9Ea9, Cry9Ea10, Cry9Ea11, Cry9Eb1, Cry9Eb2, Cry9Eb3, Cry9Ec1, Cry9Ed1, Cry9Ee1, Cry9Ee2, Cry9Fa1, Cry9Ga1, Cry9-like, Cry10Aa1, Cry10Aa2, Cry10Aa3, Cry10Aa4, Cry10A-like, Cry11Aa1, Cry11Aa2, Cry11Aa3, Cry11Aa4, Cry11Aa5, Cry11Aa-like, Cry11Ba1, Cry11Bb1, Cry11Bb2, Cry12Aa1, Cry13Aa1, Cry13Aa2, Cry14Aa1, Cry14Ab1, Cry15Aa1, Cry16Aa1, Cry17Aa1, Cry18Aa1, Cry18Ba1, Cry18Ca1, Cry19Aa1, Cry19Ba1, Cry19Ca1, Cry20Aa1, Cry20Ba1, Cry20Ba2, Cry20-like, Cry21Aa1, Cry21Aa2, Cry21Aa3, Cry21Ba1, Cry21Ca1, Cry21Ca2, Cry21Da1, Cry21Ea1, Cry21Fa1, Cry21Ga1, Cry21Ha1, Cry22Aa1, Cry22Aa2, Cry22Aa3, Cry22Ab1, Cry22Ab2, Cry22Ba1, Cry22Bb1, Cry23Aa1, Cry24Aa1, Cry24Ba1, Cry24Ca1, Cry24Da1, Cry25Aa1, Cry26Aa1, Cry27Aa1, Cry28Aa1, Cry28Aa2, Cry29Aa1, Cry29Ba1, Cry30Aa1, Cry30Ba1, Cry30Ca1, Cry30Ca2, Cry30Da1, Cry30db1, Cry30Ea1, Cry30Ea2, Cry30Ea3, Cry30Ea4, Cry30Fa1, Cry30Ga1, Cry30Ga2, Cry31Aa1, Cry31Aa2, Cry31Aa3, Cry31Aa4, Cry31Aa5, Cry31Aa6, Cry31Ab1, Cry31Ab2, Cry31Ac1, Cry31Ac2, Cry31Ad1, Cry31Ad2, Cry32Aa1, Cry32Aa2, Cry32Ab1, Cry32Ba1, Cry32Ca1, Cry32Cb1, Cry32Da1, Cry32Ea1, Cry32Ea2, Cry32Eb1, Cry32Fa1, Cry32Ga1, Cry32Ha1, Cry32Hb1, Cry32Ia1, Cry32Ja1, Cry32Ka1, Cry32La1, Cry32Ma1, Cry32Mb1, Cry32Na1, Cry32Oa1, Cry32Pa1, Cry32Qa1, Cry32Ra1, Cry32Sa1, Cry32Ta1, Cry32Ua1, Cry32Va1, Cry32Wa1, Cry32Wa2, Cry32Xa1, Cry32Ya1, Cry33Aa1, Cry34Aa1, Cry34Aa2, Cry34Aa3, Cry34Aa4, Cry34Ab1, Cry34Ac1, Cry34Ac2, Cry34Ac3, Cry34Ba1, Cry34Ba2, Cry34Ba3, Cry35Aa1, Cry35Aa2, Cry35Aa3, Cry35Aa4, Cry35Ab1, Cry35Ab2, Cry35Ab3, Cry35Ac1, Cry35Ba1, Cry35Ba2, Cry35Ba3, Cry36Aa1, Cry37Aa1, Cry38Aa1, Cry39Aa1, Cry40Aa1, Cry40Ba1, Cry40Ca1, Cry40Da1, Cry41Aa1, Cry41Ab1, Cry41Ba1, Cry41Ba2, Cry41Ca1, Cry42Aa1, Cry43Aa1, Cry43Aa2, Cry43Ba1, Cry43Ca1, Cry43Cb1, Cry43Cc1, Cry43-like, Cry44Aa1, Cry45Aa1, Cry45Ba1, Cry46Aa1, Cry46Aa2, Cry46Ab1, Cry47Aa1, Cry48Aa1, Cry48Aa2, Cry48Aa3, Cry48Ab1, Cry48Ab2, Cry49Aa1, Cry49Aa2, Cry49Aa3, Cry49Aa4, Cry49Ab1, Cry50Aa1, Cry50Ba1, Cry50Ba2, Cry51Aa1, Cry51Aa2, Cry52Aa1, Cry52Ba1, Cry52Ca1, Cry53Aa1, Cry53Ab1, Cry54Aa1, Cry54Aa2, Cry54Ab1, Cry54Ba1, Cry54Ba2, Cry55Aa1, Cry55Aa2, Cry55Aa3, Cry56Aa1, Cry56Aa2, Cry56Aa3, Cry56Aa4, Cry57Aa1, Cry57Ab1, Cry58Aa1, Cry59Ba1, Cry59Aa1, Cry60Aa1, Cry60Aa2, Cry60Aa3, Cry60Ba1, Cry60Ba2, Cry60Ba3, Cry61Aa1, Cry61Aa2, Cry61Aa3, Cry62Aa1, Cry63Aa1, Cry64Aa1, Cry64Ba1, Cry64Ca1, Cry65Aa1, Cry65Aa2, Cry66Aa1, Cry66Aa2, Cry67Aa1, Cry67Aa2, Cry68Aa1, Cry69Aa1, Cry69Aa2, Cry69Ab1, Cry70Aa1, Cry70Ba1, Cry70Bb1, Cry71Aa1, Cry72Aa1, Cry72Aa2, Cry73Aa1, Cry74Aa, Cry75Aa1, Cry75Aa2, Cry75Aa3, Cry76Aa1, Cry77Aa1, or Cry78Aa1, Cyt1Aa1, Cyt1Aa2, Cyt1Aa3, Cyt1Aa4, Cyt1Aa5, Cyt1Aa6, Cyt1Aa7, Cyt1Aa8, Cyt1Aa-like, Cyt1Ab1, Cyt1Ba1, Cyt1Ca1, Cyt1Da1, Cyt1Da2, Cyt2Aa1, Cyt2Aa2, Cyt2Aa3, Cyt2Aa4, Cyt2Ba1, Cyt2Ba2, Cyt2Ba3, Cyt2Ba4, Cyt2Ba5, Cyt2Ba6, Cyt2Ba7, Cyt2Ba8, Cyt2Ba9, Cyt2Ba10, Cyt2Ba11, Cyt2Ba12, Cyt2Ba13, Cyt2Ba14, Cyt2Ba15, Cyt2Ba16, Cyt2Ba-like, Cyt2Bb1, Cyt2Bc1, Cyt2B-like, Cyt2Ca1, and Cyt3Aa1.

[1332] In some embodiments, a combination or composition comprises, consists essentially of, or consists of: an Av3-Variant Polypeptide (AVP) having an amino acid sequence according to the amino acid sequence set forth in SEQ ID NO: 67, and a Cry toxin, or a Cyt toxin, wherein the Cry toxin or Cyt toxin has an amino acid sequence according to SEQ ID NOs: 412-481.

[1333] In some embodiments, a combination or composition comprises, consists essentially of, or consists of: an Av3-Variant Polypeptide (AVP) having an amino acid sequence according to the amino acid sequence set forth in SEQ ID NO: 67, and a Bt toxin, wherein the Bt toxin is a secreted protein.

[1334] In some embodiments, a combination or composition comprises, consists essentially of, or consists of: an Av3-Variant Polypeptide (AVP) having an amino acid sequence according to the amino acid sequence set forth in SEQ ID NO: 67, and a Bt toxin, wherein the Bt toxin is a secreted protein, wherein the secreted protein is a vegetative insecticidal protein (Vip), a secreted insecticidal protein (Sip), a Bin-like family protein, or an ETX_MTX2-family protein.

[1335] In some embodiments, a combination or composition comprises, consists essentially of, or consists of: an Av3-Variant Polypeptide (AVP) having an amino acid sequence according to the amino acid sequence set forth in SEQ ID NO: 67, and a Bt toxin, wherein the Bt toxin is a secreted protein, and wherein the secreted protein is a Vip.

[1336] In some embodiments, a combination or composition comprises, consists essentially of, or consists of: an Av3-Variant Polypeptide (AVP) having an amino acid sequence according to the amino acid sequence set forth in SEQ ID NO: 67, and a Vip, wherein the Vip is a Vip 1 family protein, a Vip 2 family protein, a Vip 3 family protein, or a Vip 4 family protein.

[1337] In some embodiments, a combination or composition comprises, consists essentially of, or consists of: an Av3-Variant Polypeptide (AVP) having an amino acid sequence according to the amino acid sequence set forth in SEQ ID NO: 67, and a Vip, wherein the Vip is selected from the group consisting of: Vip1Aa1, Vip1Aa2, Vip1Aa3, Vip1Ab1, Vip1Ac1, Vip1Ad1, Vip1Ba1, Vip1Ba2, Vip1Bb1, Vip1Bb2, Vip1Bb3, Vip1Bc1, Vip1Ca1, Vip1Ca2, Vip1Da1, Vip2Aa1, Vip2Aa2, Vip2Aa3, Vip2Ab1, Vip2Ac1, Vip2Ac2, Vip2Ad1, Vip2Ae1, Vip2Ae2, Vip2Ae3, Vip2Af1, Vip2Af2, Vip2Ag1, Vip2Ag2, Vip2Ba1, Vip2Ba2, Vip2Bb1, Vip2Bb2, Vip2Bb3, Vip2Bb4, Vip3Aa1, Vip3Aa2, Vip3Aa3, Vip3Aa4, Vip3Aa5, Vip3Aa6, Vip3Aa7, Vip3Aa8, Vip3Aa9, Vip3Aa10, Vip3Aa11, Vip3Aa12, Vip3Aa13, Vip3Aa14, Vip3Aa15, Vip3Aa16, Vip3Aa17, Vip3Aa18, Vip3Aa19.0, Vip3Aa19, Vip3Aa20, Vip3Aa21, Vip3Aa22, Vip3Aa23, Vip3Aa24, Vip3Aa25, Vip3Aa26, Vip3Aa27, Vip3Aa28, Vip3Aa29, Vip3Aa30, Vip3Aa31, Vip3Aa32, Vip3Aa33, Vip3Aa34, Vip3Aa35, Vip3Aa36, Vip3Aa37, Vip3Aa38, Vip3Aa39, Vip3Aa40, Vip3Aa41, Vip3Aa42, Vip3Aa43, Vip3Aa44, Vip3Aa45, Vip3Aa46, Vip3Aa47, Vip3Aa48, Vip3Aa49, Vip3Aa50, Vip3Aa51, Vip3Aa52, Vip3Aa53, Vip3Aa54, Vip3Aa55, Vip3Aa56, Vip3Aa57, Vip3Aa58, Vip3Aa59, Vip3Aa60, Vip3Aa61, Vip3Aa62, Vip3Aa63, Vip3Aa64, Vip3Aa65, Vip3Aa66, Vip3Ab1, Vip3Ab2, Vip3Ac1, Vip3Ad1, Vip3Ad2, Vip3Ad3, Vip3Ad4, Vip3Ad5, Vip3Ad6, Vip3Ae1, Vip3Af1, Vip3Af2, Vip3Af3, Vip3Af4, Vip3Ag1, Vip3Ag2, Vip3Ag3, Vip3Ag4, Vip3Ag5, Vip3Ag6, Vip3Ag7, Vip3Ag8, Vip3Ag9, Vip3Ag10, Vip3Ag11, Vip3Ag12, Vip3Ag13, Vip3Ag14, Vip3Ag15, Vip3Ah1, Vip3Ah2, Vip3Ai1, Vip3Aj1, Vip3Aj2, Vip3Ba1, Vip3Ba2, Vip3Bb1, Vip3Bb2, Vip3Bb3, Vip3Bc, Vip3Ca1, Vip3Ca2, Vip3Ca3, Vip3Ca4, and Vip4Aa1.

[1338] In some embodiments, a combination or composition comprises, consists essentially of, or consists of: an Av3-Variant Polypeptide (AVP) having an amino acid sequence according to the amino acid sequence set forth in SEQ ID NO: 67, and a Vip, wherein the Vip protein has an amino acid sequence according to the amino acid sequence set forth in SEQ ID NOs: 482-587.

[1339] In some embodiments, a combination or composition comprises, consists essentially of, or consists of: one or more fermentation solids, spores, or toxins isolated from a Bacillus thuringiensis ssp. kurstaki strain EVB-113-19; a Bacillus thuringiensis ssp. tenebrionis strain NB-176; or a Bacillus thuringiensis ssp. israelensis strain BMP 144; and an Av3-Variant Polypeptide (AVP) having an amino acid sequence according to the amino acid sequence set forth in SEQ ID NO: 67.

[1340] In some embodiments, a combination or composition comprises, consists essentially of, or consists of: one or more fermentation solids, spores, or toxins isolated from a Bacillus thuringiensis ssp. kurstaki strain EVB-113-19, and an Av3-Variant Polypeptide (AVP) having an amino acid sequence according to the amino acid sequence set forth in SEQ ID NO: 67.

[1341] In some embodiments, a combination or composition comprises, consists essentially of, or consists of: an Av3-Variant Polypeptide (AVP) having an amino acid sequence according to the amino acid sequence set forth in SEQ ID NO: 67, and one or more fermentation solids, spores, or toxins isolated from a Bacillus thuringiensis ssp. kurstaki strain EVB-113-19, wherein the combination or composition comprises a concentration of one or more fermentation solids, spores, or toxins isolated from a Bacillus thuringiensis ssp. kurstaki strain EVB-113-19 ranging from about 0.0001% w/w, 0.0005% w/w, 0.001% w/w, 0.005% w/w, 0.01% w/w, 0.02% w/w, 0.03% w/w, 0.04% w/w, 0.05% w/w, 0.06% w/w, 0.07% w/w, 0.08% w/w, 0.09% w/w, 0.1% w/w, 0.2% w/w, 0.3% w/w, 0.4% w/w, 0.5% w/w, 0.6% w/w, 0.7% w/w, 0.8% w/w, 0.9% w/w, 1% w/w, 2% w/w, 3% w/w, 4% w/w, 5% w/w, 6% w/w, 7% w/w, 8% w/w, 9% w/w, 10% w/w, 11% w/w, 12% w/w, 13% w/w, 14% w/w, 15% w/w, 16% w/w, 17% w/w, 18% w/w, 19% w/w, 20% w/w, 21% w/w, 22% w/w, 23% w/w, 24% w/w, 25% w/w, 26% w/w, 27% w/w, 28% w/w, 29% w/w, 30% w/w, 31% w/w, 32% w/w, 33% w/w, 34% w/w, 35% w/w, 36% w/w, 37% w/w, 38% w/w, 39% w/w, 40% w/w, 41% w/w, 42% w/w, 43% w/w, 44% w/w, 45% w/w, 46% w/w, 47% w/w, 48% w/w, 49% w/w, 50% w/w, 51% w/w, 52% w/w, 53% w/w, 54% w/w, 55% w/w, 56% w/w, 57% w/w, 58% w/w, 59% w/w, 60% w/w, 61% w/w, 62% w/w, 63% w/w, 64% w/w, 65% w/w, 66% w/w, 67% w/w, 68% w/w, 69% w/w, 70% w/w, 71% w/w, 72% w/w, 73% w/w, 74% w/w, 75% w/w, 76% w/w, 77% w/w, 78% w/w, 79% w/w, 80% w/w, 81% w/w, 82% w/w, 83% w/w, 84% w/w, 85% w/w, 86% w/w, 87% w/w, 88% w/w, 89% w/w, 90% w/w, 91% w/w, 92% w/w, 93% w/w, 94% w/w, 95% w/w, 96% w/w, 97% w/w, 98% w/w, 99% w/w, 99.1% w/w, 99.2% w/w, 99.3% w/w, 99.4% w/w, 99.5% w/w, 99.6% w/w, 99.7% w/w, 99.8% w/w, or about 99.9% w/w of the total composition.

[1342] In some embodiments, a combination or composition comprises, consists essentially of, or consists of: an Av3-Variant Polypeptide (AVP) having an amino acid sequence according to the amino acid sequence set forth in SEQ ID NO: 67, and one or more fermentation solids, spores, or toxins isolated from a Bacillus thuringiensis ssp. kurstaki strain EVB-113-19, wherein the combination or composition comprises a concentration of an Av3-Variant Polypeptide (AVP) having an amino acid sequence according to the amino acid sequence set forth in SEQ ID NO: 67 ranging from about 0.0001% w/w, 0.0005% w/w, 0.001% w/w, 0.005% w/w, 0.01% w/w, 0.02% w/w, 0.03% w/w, 0.04% w/w, 0.05% w/w, 0.06% w/w, 0.07% w/w, 0.08% w/w, 0.09% w/w, 0.1% w/w, 0.2% w/w, 0.3% w/w, 0.4% w/w, 0.5% w/w, 0.6% w/w, 0.7% w/w, 0.8% w/w, 0.9% w/w, 1% w/w, 2% w/w, 3% w/w, 4% w/w, 5% w/w, 6% w/w, 7% w/w, 8% w/w, 9% w/w, 10% w/w, 11% w/w, 12% w/w, 13% w/w, 14% w/w, 15% w/w, 16% w/w, 17% w/w, 18% w/w, 19% w/w, 20% w/w, 21% w/w, 22% w/w, 23% w/w, 24% w/w, 25% w/w, 26% w/w, 27% w/w, 28% w/w, 29% w/w, 30% w/w, 31% w/w, 32% w/w, 33% w/w, 34% w/w, 35% w/w, 36% w/w, 37% w/w, 38% w/w, 39% w/w, 40% w/w, 41% w/w, 42% w/w, 43% w/w, 44% w/w, 45% w/w, 46% w/w, 47% w/w, 48% w/w, 49% w/w, 50% w/w, 51% w/w, 52% w/w, 53% w/w, 54% w/w, 55% w/w, 56% w/w, 57% w/w, 58% w/w, 59% w/w, 60% w/w, 61% w/w, 62% w/w, 63% w/w, 64% w/w, 65% w/w, 66% w/w, 67% w/w, 68% w/w, 69% w/w, 70% w/w, 71% w/w, 72% w/w, 73% w/w, 74% w/w, 75% w/w, 76% w/w, 77% w/w, 78% w/w, 79% w/w, 80% w/w, 81% w/w, 82% w/w, 83% w/w, 84% w/w, 85% w/w, 86% w/w, 87% w/w, 88% w/w, 89% w/w, 90% w/w, 91% w/w, 92% w/w, 93% w/w, 94% w/w, 95% w/w, 96% w/w, 97% w/w, 98% w/w, 99% w/w, 99.1% w/w, 99.2% w/w, 99.3% w/w, 99.4% w/w, 99.5% w/w, 99.6% w/w, 99.7% w/w, 99.8% w/w, or about 99.9% w/w of the total composition.

[1343] Combinations: Exemplary Combinations of Bt Toxins and Γ-CNTX-Pn1a

[1344] In some embodiments, a combination or composition comprises, consists essentially of, or consists of: a Γ-CNTX-Pn1a toxin having an amino acid sequence according to the amino acid sequence set forth in SEQ ID NO: 65, and a bacterial toxin, wherein the bacterial toxin is a Bacillus thuringiensis (Bt) toxin.

[1345] In some embodiments, a combination or composition comprises, consists essentially of, or consists of: a Γ-CNTX-Pn1a toxin having an amino acid sequence according to the amino acid sequence set forth in SEQ ID NO: 65, and a Bt toxin, wherein the Bt toxin is one or more fermentation solids, spores, or toxins isolated from the group consisting of: Bacillus thuringiensis var. kurstaki (Btk); Bacillus thuringiensis var. tenebrionis (Btt); Bacillus thuringiensis var. israelensis (Bti); Bacillus thuringiensis var. aizawai; Bacillus thuringiensis var. aizawai/pacificus; Bacillus thuringiensis var. alesti; Bacillus thuringiensis var. amagiensis; Bacillus thuringiensis var. andalousiensis; Bacillus thuringiensis var. argentinensis; Bacillus thuringiensis var. asturiensis; Bacillus thuringiensis var. azorensis; Bacillus thuringiensis var. balearica; Bacillus thuringiensis var. berliner; Bacillus thuringiensis var. bolivia; Bacillus thuringiensis var. brasilensis; Bacillus thuringiensis var. cameroun; Bacillus thuringiensis var. canadensis; Bacillus thuringiensis var. chanpaisis; Bacillus thuringiensis var. chinensis; Bacillus thuringiensis var. colmeri; Bacillus thuringiensis var. coreanensis; Bacillus thuringiensis var. dakota; Bacillus thuringiensis var. darmstadiensis; Bacillus thuringiensis var. dendrolimus; Bacillus thuringiensis var. entomocidus; Bacillus thuringiensis var. entomocidus/subtoxicus; Bacillus thuringiensis var. finitimus; Bacillus thuringiensis var. fukuokaensis; Bacillus thuringiensis var. galechiae; Bacillus thuringiensis var. galleriae; Bacillus thuringiensis var. graciosensis; Bacillus thuringiensis var. guiyangiensis; Bacillus thuringiensis var. higo; Bacillus thuringiensis var. huazhongensis; Bacillus thuringiensis var. iberica; Bacillus thuringiensis var. indiana; Bacillus thuringiensis var. israelensis/tochigiensis; Bacillus thuringiensis var. japonensis; Bacillus thuringiensis var. jegathesan; Bacillus thuringiensis var. jinghongiensis; Bacillus thuringiensis var. kenyae; Bacillus thuringiensis var. kim; Bacillus thuringiensis var. kumamtoensis; Bacillus thuringiensis var. kunthalanags3; Bacillus thuringiensis var. kunthalaRX24; Bacillus thuringiensis var. kunthalaRX27; Bacillus thuringiensis var. kunthalaRX28; Bacillus thuringiensis var. kyushuensis; Bacillus thuringiensis var. leesis; Bacillus thuringiensis var. londrina; Bacillus thuringiensis var. malayensis; Bacillus thuringiensis var. medellin; Bacillus thuringiensis var. mexicanensis; Bacillus thuringiensis var. mogi; Bacillus thuringiensis var. monterrey; Bacillus thuringiensis var. morrisoni; Bacillus thuringiensis var. muju; Bacillus thuringiensis var. navarrensis; Bacillus thuringiensis var. neoleonensis; Bacillus thuringiensis var. nigeriensis; Bacillus thuringiensis var. novosibirsk; Bacillus thuringiensis var. ostriniae; Bacillus thuringiensis var. oswaldocruzi; Bacillus thuringiensis var. pahangi; Bacillus thuringiensis var. pakistani; Bacillus thuringiensis var. palmanyolensis; Bacillus thuringiensis var. pingluonsis; Bacillus thuringiensis var. pirenaica; Bacillus thuringiensis var. poloniensis; Bacillus thuringiensis var. pondicheriensis; Bacillus thuringiensis var. pulsiensis; Bacillus thuringiensis var. rongseni; Bacillus thuringiensis var. roskildiensis; Bacillus thuringiensis var. san diego; Bacillus thuringiensis var. seoulensis; Bacillus thuringiensis var. shandongiensis; Bacillus thuringiensis var. silo; Bacillus thuringiensis var. sinensis; Bacillus thuringiensis var. sooncheon; Bacillus thuringiensis var. sotto; Bacillus thuringiensis var. sotto/dendrolimus; Bacillus thuringiensis var. subtoxicus; Bacillus thuringiensis var. sumiyoshiensis; Bacillus thuringiensis var. sylvestriensis; Bacillus thuringiensis var. thailandensis; Bacillus thuringiensis var. thompsoni; Bacillus thuringiensis var. thuringiensis; Bacillus thuringiensis var. tochigiensis; Bacillus thuringiensis var. toguchini; Bacillus thuringiensis var. tohokuensis; Bacillus thuringiensis var. tolworthi; Bacillus thuringiensis var. toumanoffi; Bacillus thuringiensis var. vazensis; Bacillus thuringiensis var. wratislaviensis; Bacillus thuringiensis var. wuhanensis; Bacillus thuringiensis var. xiaguangiensis; Bacillus thuringiensis var. yosoo; Bacillus thuringiensis var. yunnanensis; Bacillus thuringiensis var. zhaodongensis; and Bacillus thuringiensis var. konkukian toxin.

[1346] In some embodiments, a combination or composition comprises, consists essentially of, or consists of: a Γ-CNTX-Pn1a toxin having an amino acid sequence according to the amino acid sequence set forth in SEQ ID NO: 65, and a Bt toxin, wherein the Bt toxin is one or more fermentation solids, spores, or toxins isolated from the group consisting of: Bacillus thuringiensis var. kurstaki (Btk); Bacillus thuringiensis var. tenebrionis (Btt); and Bacillus thuringiensis var. israelensis (Bti).

[1347] In some embodiments, a combination or composition comprises, consists essentially of, or consists of: a Γ-CNTX-Pn1a toxin having an amino acid sequence according to the amino acid sequence set forth in SEQ ID NO: 65, and a Bt toxin, wherein the Bt toxin is a parasporal crystal toxin, a secreted protein, a β-exotoxin, a 41.9-kDa insecticidal toxin, a sphaericolysin, an alveolysin, or an enhancin-like protein.

[1348] In some embodiments, a combination or composition comprises, consists essentially of, or consists of: a Γ-CNTX-Pn1a toxin having an amino acid sequence according to the amino acid sequence set forth in SEQ ID NO: 65, and a parasporal crystal toxin, wherein the parasporal crystal toxin is a δ-endotoxin.

[1349] In some embodiments, a combination or composition comprises, consists essentially of, or consists of: a Γ-CNTX-Pn1a toxin having an amino acid sequence according to the amino acid sequence set forth in SEQ ID NO: 65, and a δ-endotoxin, wherein the 6-endotoxin is a Three-domain (3D) Cry family protein, a binary Bin-like family toxin, an ETX_MTX2-like family toxin, a Toxin-10 family toxin, an Aerolysin family toxin, or a cytolysin.

[1350] In some embodiments, a combination or composition comprises, consists essentially of, or consists of: a Γ-CNTX-Pn1a toxin having an amino acid sequence according to the amino acid sequence set forth in SEQ ID NO: 65, and a δ-endotoxin, wherein the 6-endotoxin is a Three-domain (3D) Cry toxin, a mosquitocidal Cry toxin (Mtx), a binary-like (Bin) toxin, or a Cyt toxin.

[1351] In some embodiments, a combination or composition comprises, consists essentially of, or consists of: a Γ-CNTX-Pn1a toxin having an amino acid sequence according to the amino acid sequence set forth in SEQ ID NO: 65, and a δ-endotoxin, wherein the 6-endotoxin is a Three-domain (3D) Cry toxin or a Cyt toxin.

[1352] In some embodiments, a combination or composition comprises, consists essentially of, or consists of: a Γ-CNTX-Pn1a toxin having an amino acid sequence according to the amino acid sequence set forth in SEQ ID NO: 65, and a δ-endotoxin, wherein the 6-endotoxin is selected from the group consisting of: Cry1Aa1, Cry1Aa2, Cry1Aa3, Cry1Aa4, Cry1Aa5, Cry1Aa6, Cry1Aa7, Cry1Aa8, Cry1Aa9, Cry1Aa10, Cry1Aa11, Cry1Aa12, Cry1Aa13, Cry1Aa14, Cry1Aa15, Cry1Aa16, Cry1Aa17, Cry1Aa18, Cry1Aa19, Cry1Aa20, Cry1Aa21, Cry1Aa22, Cry1Aa23, Cry1Aa24, Cry1Aa25, Cry1Ab1, Cry1Ab2, Cry1Ab3, Cry1Ab4, Cry1Ab5, Cry1Ab6, Cry1Ab7, Cry1Ab8, Cry1Ab9, Cry1Ab10, Cry1Ab11, Cry1Ab12, Cry1Ab13, Cry1Ab14, Cry1Ab15, Cry1Ab16, Cry1Ab17, Cry1Ab18, Cry1Ab19, Cry1Ab20, Cry1Ab21, Cry1Ab22, Cry1Ab23, Cry1Ab24, Cry1Ab25, Cry1Ab26, Cry1Ab27, Cry1Ab28, Cry1Ab29, Cry1Ab30, Cry1Ab31, Cry1Ab32, Cry1Ab33, Cry1Ab34, Cry1Ab35, Cry1Ab36, Cry1Ab-like, Cry1Ab-like, Cry1Ab-like, Cry1Ab-like, Cry1Ac1, Cry1Ac2, Cry1Ac3, Cry1Ac4, Cry1Ac5, Cry1Ac6, Cry1Ac7, Cry1Ac8, Cry1Ac9, Cry1Ab10, Cry1Ac11, Cry1Ac12, Cry1Ac13, Cry1Ac14, Cry1Ac15, Cry1Ac16, Cry1Ac17, Cry1Ac18, Cry1Ac19, Cry1Ac20, Cry1Ac21, Cry1Ac22, Cry1Ac23, Cry1Ac24, Cry1Ac25, Cry1Ac26, Cry1Ac27, Cry1Ac28, Cry1Ac29, Cry1Ac30, Cry1Ac31, Cry1Ac32, Cry1Ac33, Cry1Ac34, Cry1Ac35, Cry1Ac36, Cry1Ac37, Cry1Ac38, Cry1Ac39, Cry1Ad1, Cry1Ad2, Cry1Ae1, Cry1Af1, Cry1Ag1, Cry1Ah1, Cry1Ah2, Cry1Ah3, Cry1Ai1, Cry1Ai2, Cry1Aj1, Cry1A-like, Cry1Ba1, Cry1Ba2, Cry1Ba3, Cry1Ba4, Cry1Ba5, Cry1Ba6, Cry1Ba7, Cry1Ba8, Cry1Bb1, Cry1Bb2, Cry1Bb3, Cry1Bc1, Cry1Bd1, Cry1Bd2, Cry1Bd3, Cry1Be1, Cry1Be2, Cry1Be3, Cry1Be4, Cry1Be5, Cry1Bf1, Cry1Bf2, Cry1Bg1, Cry1Bh1, Cry1Bi1, Cry1Bj1, Cry1Ca1, Cry1Ca2, Cry1Ca3, Cry1Ca4, Cry1Ca5, Cry1Ca6, Cry1Ca7, Cry1Ca8, Cry1Ca9, Cry1Ca10, Cry1Ca11, Cry1Ca12, Cry1Ca13, Cry1Ca14, Cry1Ca15, Cry1Cb1, Cry1Cb2, Cry1Cb3, Cry1Cb-like, Cry1Da1, Cry1Da2, Cry1Da3, Cry1Da4, Cry1Da5, Cry1db1, Cry1db2, Cry1Dc1, Cry1Dd1, Cry1Ea1, Cry1Ea2, Cry1Ea3, Cry1Ea4, Cry1Ea5, Cry1Ea6, Cry1Ea7, Cry1Ea8, Cry1Ea9, Cry1Ea10, Cry1Ea11, Cry1Ea12, Cry1Eb1, Cry1Fa1, Cry1Fa2, Cry1Fa3, Cry1Fa4, Cry1Fb1, Cry1Fb2, Cry1Fb3, Cry1Fb4, Cry1Fb5, Cry1Fb6, Cry1Fb7, Cry1Ga1, Cry1Ga2, Cry1Gb1, Cry1Gb2, Cry1Gc1, Cry1Ha1, Cry1Hb1, Cry1Hb2, Cry1Hc1, Cry1H-like, Cry1Ia1, Cry1Ia2, Cry1Ia3, Cry1Ia4, Cry1Ia5, Cry1Ia6, Cry1Ia7, Cry1Ia8, Cry1Ia9, Cry1Ia10, Cry1Ia11, Cry1Ia12, Cry1Ia13, Cry1Ia14, Cry1Ia15, Cry1Ia16, Cry1Ia17, Cry1Ia18, Cry1Ia19, Cry1Ia20, Cry1Ia21, Cry1Ia22, Cry1Ia23, Cry1Ia24, Cry1Ia25, Cry1Ia26, Cry1Ia27, Cry1Ia28, Cry1Ia29, Cry1Ia30, Cry1Ia31, Cry1Ia32, Cry1Ia33, Cry1Ia34, Cry1Ia35, Cry1Ia36, Cry1Ia37, Cry1Ia38, Cry1Ia39, Cry1Ia40, Cry1Ib1, Cry1Ib2, Cry1Ib3, Cry1Ib4, Cry1Ib5, Cry1Ib6, Cry1Ib7, Cry1Ib8, Cry1Ib9, Cry1Ib10, Cry1Ib11, Cry1Ic1, Cry1Ic2, Cry1Id1, Cry1Id2, Cry1Id3, Cry1Ie1, Cry1Ie2, Cry1Ie3, Cry1Ie4, Cry1Ie5, Cry1If1, Cry1Ig1, Cry1I-like, Cry1I-like, Cry1Ia1, Cry1Ja2, Cry1Ja3, Cry1Jb1, Cry1Jc1, Cry1Jc2, Cry1Jd1, Cry1Ka1, Cry1Ka2, Cry1La1, Cry1La2, Cry1La3, Cry1Ma1, Cry1Ma2, Cry1Na1, Cry1Na2, Cry1Na3, Cry1Nb1, Cry1-like, Cry2Aa1, Cry2Aa2, Cry2Aa3, Cry2Aa4, Cry2Aa5, Cry2Aa6, Cry2Aa7, Cry2Aa8, Cry2Aa9, Cry2Aa10, Cry2Aa11, Cry2Aa12, Cry2Aa13, Cry2Aa14, Cry2Aa15, Cry2Aa16, Cry2Aa17, Cry2Aa18, Cry2Aa19, Cry2Aa20, Cry2Aa21, Cry2Aa22, Cry2Aa23, Cry2Aa23, Cry2Aa25, Cry2Ab1, Cry2Ab2, Cry2Ab3, Cry2Ab4, Cry2Ab5, Cry2Ab6, Cry2Ab7, Cry2Ab8, Cry2Ab9, Cry2Ab10, Cry2Ab11, Cry2Ab12, Cry2Ab13, Cry2Ab14, Cry2Ab15, Cry2Ab16, Cry2Ab17, Cry2Ab18, Cry2Ab19, Cry2Ab20, Cry2Ab21, Cry2Ab22, Cry2Ab23, Cry2Ab24, Cry2Ab25, Cry2Ab26, Cry2Ab27, Cry2Ab28, Cry2Ab29, Cry2Ab30, Cry2Ab31, Cry2Ab32, Cry2Ab33, Cry2Ab34, Cry2Ab35, Cry2Ab36, Cry2Ac1, Cry2Ac2, Cry2Ac3, Cry2Ac4, Cry2Ac5, Cry2Ac6, Cry2Ac7, Cry2Ac8, Cry2Ac9, Cry2Ac10, Cry2Ac11, Cry2Ac12, Cry2Ad1, Cry2Ad2, Cry2Ad3, Cry2Ad4, Cry2Ad5, Cry2Ae1, Cry2Af1, Cry2Af2, Cry2Ag1, Cry2Ah1, Cry2Ah2, Cry2Ah3, Cry2Ah4, Cry2Ah5, Cry2Ah6, Cry2Ai1, Cry2Aj1, Cry2Ak1, Cry2A11, Cry2Ba1, Cry2Ba2, Cry3Aa1, Cry3Aa2, Cry3Aa3, Cry3Aa4, Cry3Aa5, Cry3Aa6, Cry3Aa7, Cry3Aa8, Cry3Aa9, Cry3Aa10, Cry3Aa11, Cry3Aa12, Cry3Ba1, Cry3Ba2, Cry3Ba3, Cry3Bb1, Cry3Bb2, Cry3Bb3, Cry3Ca1, Cry4Aa1, Cry4Aa2, Cry4Aa3, Cry4Aa4, Cry4A-like, Cry4Ba1, Cry4Ba2, Cry4Ba3, Cry4Ba4, Cry4Ba5, Cry4Ba-like, Cry4Ca1, Cry4Ca2, Cry4Cb1, Cry4Cb2, Cry4Cb3, Cry4Cc1, Cry5Aa1, Cry5Ab1, Cry5Ac1, Cry5Ad1, Cry5Ba1, Cry5Ba2, Cry5Ba3, Cry5Ca1, Cry5Ca2, Cry5Da1, Cry5Da2, Cry5Ea1, Cry5Ea2, Cry6Aa1, Cry6Aa2, Cry6Aa3, Cry6Ba1, Cry7Aa1, Cry7Aa2, Cry7Ab1, Cry7Ab2, Cry7Ab3, Cry7Ab4, Cry7Ab5, Cry7Ab6, Cry7Ab7, Cry7Ab8, Cry7Ab9, Cry7Ac1, Cry7Ba1, Cry7Bb1, Cry7Ca1, Cry7Cb1, Cry7Da1, Cry7Da2, Cry7Da3, Cry7Ea1, Cry7Ea2, Cry7Ea3, Cry7Fa1, Cry7Fa2, Cry7Fb1, Cry7Fb2, Cry7Fb3, Cry7Ga1, Cry7Ga2, Cry7Gb1, Cry7Gc1, Cry7Gd1, Cry7Ha1, Cry7Ia1, Cry7Ja1, Cry7Ka1, Cry7Kb1, Cry7La1, Cry8Aa1, Cry8Ab1, Cry8Ac1, Cry8Ad1, Cry8Ba1, Cry8Bb1, Cry8Bc1, Cry8Ca1, Cry8Ca2, Cry8Ca3, Cry8Ca4, Cry8Ca5, Cry8Da1, Cry8Da2, Cry8Da3, Cry8db1, Cry8Ea1, Cry8Ea2, Cry8Ea3, Cry8Ea4, Cry8Ea5, Cry8Ea6, Cry8Fa1, Cry8Fa2, Cry8Fa3, Cry8Fa4, Cry8Ga1, Cry8Ga2, Cry8Ga3, Cry8Ha1, Cry8Hb1, Cry8Ia1, Cry8Ia2, Cry8Ia3, Cry8Ia4, Cry8Ib1, Cry8Ib2, Cry8Ib3, Cry8Ja1, Cry8Ka1, Cry8Ka2, Cry8Ka3, Cry8Kb1, Cry8Kb2, Cry8Kb3, Cry8La1, Cry8Ma1, Cry8Ma2, Cry8Ma3, Cry8Na1, Cry8Pa1, Cry8Pa2, Cry8Pa3, Cry8Qa1, Cry8Qa2, Cry8Ra1, Cry8Sa1, Cry8Ta1, Cry8-like, Cry8-like, Cry9Aa1, Cry9Aa2, Cry9Aa3, Cry9Aa4, Cry9Aa5, Cry9Aa, like, Cry9Ba1, Cry9Ba2, Cry9Bb1, Cry9Ca1, Cry9Ca2, Cry9Cb1, Cry9Da1, Cry9Da2, Cry9Da3, Cry9Da4, Cry9db1, Cry9Dc1, Cry9Ea1, Cry9Ea2, Cry9Ea3, Cry9Ea4, Cry9Ea5, Cry9Ea6, Cry9Ea7, Cry9Ea8, Cry9Ea9, Cry9Ea10, Cry9Ea11, Cry9Eb1, Cry9Eb2, Cry9Eb3, Cry9Ec1, Cry9Ed1, Cry9Ee1, Cry9Ee2, Cry9Fa1, Cry9Ga1, Cry9-like, Cry10Aa1, Cry10Aa2, Cry10Aa3, Cry10Aa4, Cry10A-like, Cry11Aa1, Cry11Aa2, Cry11Aa3, Cry11Aa4, Cry11Aa5, Cry11Aa-like, Cry11Ba1, Cry11Bb1, Cry11Bb2, Cry12Aa1, Cry13Aa1, Cry13Aa2, Cry14Aa1, Cry14Ab1, Cry15Aa1, Cry16Aa1, Cry17Aa1, Cry18Aa1, Cry18Ba1, Cry18Ca1, Cry19Aa1, Cry19Ba1, Cry19Ca1, Cry20Aa1, Cry20Ba1, Cry20Ba2, Cry20-like, Cry21Aa1, Cry21Aa2, Cry21Aa3, Cry21Ba1, Cry21Ca1, Cry21Ca2, Cry21Da1, Cry21Ea1, Cry21Fa1, Cry21Ga1, Cry21Ha1, Cry22Aa1, Cry22Aa2, Cry22Aa3, Cry22Ab1, Cry22Ab2, Cry22Ba1, Cry22Bb1, Cry23Aa1, Cry24Aa1, Cry24Ba1, Cry24Ca1, Cry24Da1, Cry25Aa1, Cry26Aa1, Cry27Aa1, Cry28Aa1, Cry28Aa2, Cry29Aa1, Cry29Ba1, Cry30Aa1, Cry30Ba1, Cry30Ca1, Cry30Ca2, Cry30Da1, Cry30db1, Cry30Ea1, Cry30Ea2, Cry30Ea3, Cry30Ea4, Cry30Fa1, Cry30Ga1, Cry30Ga2, Cry31Aa1, Cry31Aa2, Cry31Aa3, Cry31Aa4, Cry31Aa5, Cry31Aa6, Cry31Ab1, Cry31Ab2, Cry31Ac1, Cry31Ac2, Cry31Ad1, Cry31Ad2, Cry32Aa1, Cry32Aa2, Cry32Ab1, Cry32Ba1, Cry32Ca1, Cry32Cb1, Cry32Da1, Cry32Ea1, Cry32Ea2, Cry32Eb1, Cry32Fa1, Cry32Ga1, Cry32Ha1, Cry32Hb1, Cry32Ia1, Cry32Ja1, Cry32Ka1, Cry32La1, Cry32Ma1, Cry32 Mb1, Cry32Na1, Cry32Oa1, Cry32Pa1, Cry32Qa1, Cry32Ra1, Cry32Sa1, Cry32Ta1, Cry32Ua1, Cry32Va1, Cry32Wa1, Cry32Wa2, Cry32Xa1, Cry32Ya1, Cry33Aa1, Cry34Aa1, Cry34Aa2, Cry34Aa3, Cry34Aa4, Cry34Ab1, Cry34Ac1, Cry34Ac2, Cry34Ac3, Cry34Ba1, Cry34Ba2, Cry34Ba3, Cry35Aa1, Cry35Aa2, Cry35Aa3, Cry35Aa4, Cry35Ab1, Cry35Ab2, Cry35Ab3, Cry35Ac1, Cry35Ba1, Cry35Ba2, Cry35Ba3, Cry36Aa1, Cry37Aa1, Cry38Aa1, Cry39Aa1, Cry40Aa1, Cry40Ba1, Cry40Ca1, Cry40Da1, Cry41Aa1, Cry41Ab1, Cry41Ba1, Cry41Ba2, Cry41Ca1, Cry42Aa1, Cry43Aa1, Cry43Aa2, Cry43Ba1, Cry43Ca1, Cry43Cb1, Cry43Cc1, Cry43-like, Cry44Aa1, Cry45Aa1, Cry45Ba1, Cry46Aa1, Cry46Aa2, Cry46Ab1, Cry47Aa1, Cry48Aa1, Cry48Aa2, Cry48Aa3, Cry48Ab1, Cry48Ab2, Cry49Aa1, Cry49Aa2, Cry49Aa3, Cry49Aa4, Cry49Ab1, Cry50Aa1, Cry50Ba1, Cry50Ba2, Cry51Aa1, Cry51Aa2, Cry52Aa1, Cry52Ba1, Cry52Ca1, Cry53Aa1, Cry53Ab1, Cry54Aa1, Cry54Aa2, Cry54Ab1, Cry54Ba1, Cry54Ba2, Cry55Aa1, Cry55Aa2, Cry55Aa3, Cry56Aa1, Cry56Aa2, Cry56Aa3, Cry56Aa4, Cry57Aa1, Cry57Ab1, Cry58Aa1, Cry59Ba1, Cry59Aa1, Cry60Aa1, Cry60Aa2, Cry60Aa3, Cry60Ba1, Cry60Ba2, Cry60Ba3, Cry61Aa1, Cry61Aa2, Cry61Aa3, Cry62Aa1, Cry63Aa1, Cry64Aa1, Cry64Ba1, Cry64Ca1, Cry65Aa1, Cry65Aa2, Cry66Aa1, Cry66Aa2, Cry67Aa1, Cry67Aa2, Cry68Aa1, Cry69Aa1, Cry69Aa2, Cry69Ab1, Cry70Aa1, Cry70Ba1, Cry70Bb1, Cry71Aa1, Cry72Aa1, Cry72Aa2, Cry73Aa1, Cry74Aa, Cry75Aa1, Cry75Aa2, Cry75Aa3, Cry76Aa1, Cry77Aa1, or Cry78Aa1, Cyt1Aa1, Cyt1Aa2, Cyt1Aa3, Cyt1Aa4, Cyt1Aa5, Cyt1Aa6, Cyt1Aa7, Cyt1Aa8, Cyt1Aa-like, Cyt1Ab1, Cyt1Ba1, Cyt1Ca1, Cyt1Da1, Cyt1Da2, Cyt2Aa1, Cyt2Aa2, Cyt2Aa3, Cyt2Aa4, Cyt2Ba1, Cyt2Ba2, Cyt2Ba3, Cyt2Ba4, Cyt2Ba5, Cyt2Ba6, Cyt2Ba7, Cyt2Ba8, Cyt2Ba9, Cyt2Ba10, Cyt2Ba11, Cyt2Ba12, Cyt2Ba13, Cyt2Ba14, Cyt2Ba15, Cyt2Ba16, Cyt2Ba-like, Cyt2Bb1, Cyt2Bc1, Cyt2B-like, Cyt2Ca1, and Cyt3Aa1.

[1353] In some embodiments, a combination or composition comprises, consists essentially of, or consists of: a Γ-CNTX-Pn1a toxin having an amino acid sequence according to the amino acid sequence set forth in SEQ ID NO: 65, and a Cry toxin, or a Cyt toxin, wherein the Cry toxin or Cyt toxin has an amino acid sequence according to SEQ ID NOs: 412-481.

[1354] In some embodiments, a combination or composition comprises, consists essentially of, or consists of: a Γ-CNTX-Pn1a toxin having an amino acid sequence according to the amino acid sequence set forth in SEQ ID NO: 65, and a Bt toxin, wherein the Bt toxin is a secreted protein.

[1355] In some embodiments, a combination or composition comprises, consists essentially of, or consists of: a Γ-CNTX-Pn1a toxin having an amino acid sequence according to the amino acid sequence set forth in SEQ ID NO: 65, and a Bt toxin, wherein the Bt toxin is a secreted protein, wherein the secreted protein is a vegetative insecticidal protein (Vip), a secreted insecticidal protein (Sip), a Bin-like family protein, or an ETX_MTX2-family protein.

[1356] In some embodiments, a combination or composition comprises, consists essentially of, or consists of: a Γ-CNTX-Pn1a toxin having an amino acid sequence according to the amino acid sequence set forth in SEQ ID NO: 65, and a Bt toxin, wherein the Bt toxin is a secreted protein, and wherein the secreted protein is a Vip.

[1357] In some embodiments, a combination or composition comprises, consists essentially of, or consists of: a Γ-CNTX-Pn1a toxin having an amino acid sequence according to the amino acid sequence set forth in SEQ ID NO: 65, and a Vip, wherein the Vip is a Vip 1 family protein, a Vip 2 family protein, a Vip 3 family protein, or a Vip 4 family protein.

[1358] In some embodiments, a combination or composition comprises, consists essentially of, or consists of: a Γ-CNTX-Pn1a toxin having an amino acid sequence according to the amino acid sequence set forth in SEQ ID NO: 65, and a Vip, wherein the Vip is selected from the group consisting of: Vip1Aa1, Vip1Aa2, Vip1Aa3, Vip1Ab1, Vip1Ac1, Vip1Ad1, Vip1Ba1, Vip1Ba2, Vip1Bb1, Vip1Bb2, Vip1Bb3, Vip1Bc1, Vip1Ca1, Vip1Ca2, Vip1Da1, Vip2Aa1, Vip2Aa2, Vip2Aa3, Vip2Ab1, Vip2Ac1, Vip2Ac2, Vip2Ad1, Vip2Ae1, Vip2Ae2, Vip2Ae3, Vip2Af1, Vip2Af2, Vip2Ag1, Vip2Ag2, Vip2Ba1, Vip2Ba2, Vip2Bb1, Vip2Bb2, Vip2Bb3, Vip2Bb4, Vip3Aa1, Vip3Aa2, Vip3Aa3, Vip3Aa4, Vip3Aa5, Vip3Aa6, Vip3Aa7, Vip3Aa8, Vip3Aa9, Vip3Aa10, Vip3Aa11, Vip3Aa12, Vip3Aa13, Vip3Aa14, Vip3Aa15, Vip3Aa16, Vip3Aa17, Vip3Aa18, Vip3Aa19.0, Vip3Aa19, Vip3Aa20, Vip3Aa21, Vip3Aa22, Vip3Aa23, Vip3Aa24, Vip3Aa25, Vip3Aa26, Vip3Aa27, Vip3Aa28, Vip3Aa29, Vip3Aa30, Vip3Aa31, Vip3Aa32, Vip3Aa33, Vip3Aa34, Vip3Aa35, Vip3Aa36, Vip3Aa37, Vip3Aa38, Vip3Aa39, Vip3Aa40, Vip3Aa41, Vip3Aa42, Vip3Aa43, Vip3Aa44, Vip3Aa45, Vip3Aa46, Vip3Aa47, Vip3Aa48, Vip3Aa49, Vip3Aa50, Vip3Aa51, Vip3Aa52, Vip3Aa53, Vip3Aa54, Vip3Aa55, Vip3Aa56, Vip3Aa57, Vip3Aa58, Vip3Aa59, Vip3Aa60, Vip3Aa61, Vip3Aa62, Vip3Aa63, Vip3Aa64, Vip3Aa65, Vip3Aa66, Vip3Ab1, Vip3Ab2, Vip3Ac1, Vip3Ad1, Vip3Ad2, Vip3Ad3, Vip3Ad4, Vip3Ad5, Vip3Ad6, Vip3Ae1, Vip3Af1, Vip3Af2, Vip3Af3, Vip3Af4, Vip3Ag1, Vip3Ag2, Vip3Ag3, Vip3Ag4, Vip3Ag5, Vip3Ag6, Vip3Ag7, Vip3Ag8, Vip3Ag9, Vip3Ag10, Vip3Ag11, Vip3Ag12, Vip3Ag13, Vip3Ag14, Vip3Ag15, Vip3Ah1, Vip3Ah2, Vip3Ai1, Vip3Aj1, Vip3Aj2, Vip3Ba1, Vip3Ba2, Vip3Bb1, Vip3Bb2, Vip3Bb3, Vip3Bc, Vip3Ca1, Vip3Ca2, Vip3Ca3, Vip3Ca4, and Vip4Aa1.

[1359] In some embodiments, a combination or composition comprises, consists essentially of, or consists of: a Γ-CNTX-Pn1a toxin having an amino acid sequence according to the amino acid sequence set forth in SEQ ID NO: 65, and a Vip, wherein the Vip protein has an amino acid sequence according to the amino acid sequence set forth in SEQ ID NOs: 482-587.

[1360] In some embodiments, a combination or composition comprises, consists essentially of, or consists of: one or more fermentation solids, spores, or toxins isolated from a Bacillus thuringiensis ssp. kurstaki strain EVB-113-19; a Bacillus thuringiensis ssp. tenebrionis strain NB-176; or a Bacillus thuringiensis ssp. israelensis strain BMP 144; and a Γ-CNTX-Pn1a toxin having an amino acid sequence according to the amino acid sequence set forth in SEQ ID NO: 65.

[1361] In some embodiments, a combination or composition comprises, consists essentially of, or consists of: one or more fermentation solids, spores, or toxins isolated from a Bacillus thuringiensis ssp. kurstaki strain EVB-113-19, and a Γ-CNTX-Pn1a toxin having an amino acid sequence according to the amino acid sequence set forth in SEQ ID NO: 65.

[1362] In some embodiments, a combination or composition comprises, consists essentially of, or consists of: a Γ-CNTX-Pn1a toxin having an amino acid sequence according to the amino acid sequence set forth in SEQ ID NO: 65, and one or more fermentation solids, spores, or toxins isolated from a Bacillus thuringiensis ssp. kurstaki strain EVB-113-19, wherein the combination or composition comprises a concentration of the Γ-CNTX-Pn1a toxin having an amino acid sequence according to the amino acid sequence set forth in SEQ ID NO: 65 ranging from about 0.0001% w/w, 0.0005% w/w, 0.001% w/w, 0.005% w/w, 0.01% w/w, 0.02% w/w, 0.03% w/w, 0.04% w/w, 0.05% w/w, 0.06% w/w, 0.07% w/w, 0.08% w/w, 0.09% w/w, 0.1% w/w, 0.2% w/w, 0.3% w/w, 0.4% w/w, 0.5% w/w, 0.6% w/w, 0.7% w/w, 0.8% w/w, 0.9% w/w, 1% w/w, 2% w/w, 3% w/w, 4% w/w, 5% w/w, 6% w/w, 7% w/w, 8% w/w, 9% w/w, 10% w/w, 11% w/w, 12% w/w, 13% w/w, 14% w/w, 15% w/w, 16% w/w, 17% w/w, 18% w/w, 19% w/w, 20% w/w, 21% w/w, 22% w/w, 23% w/w, 24% w/w, 25% w/w, 26% w/w, 27% w/w, 28% w/w, 29% w/w, 30% w/w, 31% w/w, 32% w/w, 33% w/w, 34% w/w, 35% w/w, 36% w/w, 37% w/w, 38% w/w, 39% w/w, 40% w/w, 41% w/w, 42% w/w, 43% w/w, 44% w/w, 45% w/w, 46% w/w, 47% w/w, 48% w/w, 49% w/w, 50% w/w, 51% w/w, 52% w/w, 53% w/w, 54% w/w, 55% w/w, 56% w/w, 57% w/w, 58% w/w, 59% w/w, 60% w/w, 61% w/w, 62% w/w, 63% w/w, 64% w/w, 65% w/w, 66% w/w, 67% w/w, 68% w/w, 69% w/w, 70% w/w, 71% w/w, 72% w/w, 73% w/w, 74% w/w, 75% w/w, 76% w/w, 77% w/w, 78% w/w, 79% w/w, 80% w/w, 81% w/w, 82% w/w, 83% w/w, 84% w/w, 85% w/w, 86% w/w, 87% w/w, 88% w/w, 89% w/w, 90% w/w, 91% w/w, 92% w/w, 93% w/w, 94% w/w, 95% w/w, 96% w/w, 97% w/w, 98% w/w, 99% w/w, 99.1% w/w, 99.2% w/w, 99.3% w/w, 99.4% w/w, 99.5% w/w, 99.6% w/w, 99.7% w/w, 99.8% w/w, or about 99.9% w/w of the total composition.

[1363] In some embodiments, a combination or composition comprises, consists essentially of, or consists of: a Γ-CNTX-Pn1a toxin having an amino acid sequence according to the amino acid sequence set forth in SEQ ID NO: 65, and one or more fermentation solids, spores, or toxins isolated from a Bacillus thuringiensis ssp. kurstaki strain EVB-113-19, wherein the combination or composition comprises a concentration of the one or more fermentation solids, spores, or toxins isolated from a Bacillus thuringiensis ssp. kurstaki strain EVB-113-19 ranging from about 0.0001% w/w, 0.0005% w/w, 0.001% w/w, 0.005% w/w, 0.01% w/w, 0.02% w/w, 0.03% w/w, 0.04% w/w, 0.05% w/w, 0.06% w/w, 0.07% w/w, 0.08% w/w, 0.09% w/w, 0.1% w/w, 0.2% w/w, 0.3% w/w, 0.4% w/w, 0.5% w/w, 0.6% w/w, 0.7% w/w, 0.8% w/w, 0.9% w/w, 1% w/w, 2% w/w, 3% w/w, 4% w/w, 5% w/w, 6% w/w, 7% w/w, 8% w/w, 9% w/w, 10% w/w, 11% w/w, 12% w/w, 13% w/w, 14% w/w, 15% w/w, 16% w/w, 17% w/w, 18% w/w, 19% w/w, 20% w/w, 21% w/w, 22% w/w, 23% w/w, 24% w/w, 25% w/w, 26% w/w, 27% w/w, 28% w/w, 29% w/w, 30% w/w, 31% w/w, 32% w/w, 33% w/w, 34% w/w, 35% w/w, 36% w/w, 37% w/w, 38% w/w, 39% w/w, 40% w/w, 41% w/w, 42% w/w, 43% w/w, 44% w/w, 45% w/w, 46% w/w, 47% w/w, 48% w/w, 49% w/w, 50% w/w, 51% w/w, 52% w/w, 53% w/w, 54% w/w, 55% w/w, 56% w/w, 57% w/w, 58% w/w, 59% w/w, 60% w/w, 61% w/w, 62% w/w, 63% w/w, 64% w/w, 65% w/w, 66% w/w, 67% w/w, 68% w/w, 69% w/w, 70% w/w, 71% w/w, 72% w/w, 73% w/w, 74% w/w, 75% w/w, 76% w/w, 77% w/w, 78% w/w, 79% w/w, 80% w/w, 81% w/w, 82% w/w, 83% w/w, 84% w/w, 85% w/w, 86% w/w, 87% w/w, 88% w/w, 89% w/w, 90% w/w, 91% w/w, 92% w/w, 93% w/w, 94% w/w, 95% w/w, 96% w/w, 97% w/w, 98% w/w, 99% w/w, 99.1% w/w, 99.2% w/w, 99.3% w/w, 99.4% w/w, 99.5% w/w, 99.6% w/w, 99.7% w/w, 99.8% w/w, or about 99.9% w/w of the total composition.

[1364] Combinations: Exemplary Combinations of Fungal Toxins and U+2-ACTX-Hv1a

[1365] In some embodiments, a combination or composition comprises, consists essentially of, or consists of: a U+2-ACTX-Hv1a toxin having an amino acid sequence according to the amino acid sequence set forth in SEQ ID NO: 61, and a fungal toxin.

[1366] In some embodiments, a combination or composition comprises, consists essentially of, or consists of: a U+2-ACTX-Hv1a toxin having an amino acid sequence according to the amino acid sequence set forth in SEQ ID NO: 61, and a fungal toxin, wherein the fungal toxin is an Ascomycete fungal toxin.

[1367] In some embodiments, a combination or composition comprises, consists essentially of, or consists of: a U+2-ACTX-Hv1a toxin having an amino acid sequence according to the amino acid sequence set forth in SEQ ID NO: 61, and a fungal toxin, wherein the fungal toxin is a Akanthomyces toxin; a Ascopolyporus toxin; a Beauveria toxin; a Beejasamuha toxin; a Cordyceps toxin; a Coremiopsis toxin; a Engyodontium toxin; a Gibellula toxin; a Hyperdermium toxin; a Insecticola toxin; a Isaria toxin; a Lecanicillium toxin; a Microhilum toxin; a Phytocordyceps toxin; a Pseudogibellula toxin; a Rotiferophthora toxin; a Simplicillium toxin; or a Torrubiella toxin.

[1368] In some embodiments, a combination or composition comprises, consists essentially of, or consists of: a U+2-ACTX-Hv1a toxin having an amino acid sequence according to the amino acid sequence set forth in SEQ ID NO: 61, and a fungi organism or toxin therefrom, wherein the fungi organism or toxin therefrom is selected from the following genera: Beauveria; Metarhizium; Paecilomyces; Lecanicillium; Nomuraea; Isaria; Hirsutella; Sorosporella; Aspergillus; Cordiceps; Entomophthora; Zoophthora; Pandora; Entomophaga; Conidiobolus and Basidiobolus.

[1369] In some embodiments, a combination or composition comprises, consists essentially of, or consists of: a U+2-ACTX-Hv1a toxin having an amino acid sequence according to the amino acid sequence set forth in SEQ ID NO: 61, and a Beauveria toxin.

[1370] In some embodiments, a combination or composition comprises, consists essentially of, or consists of: a U+2-ACTX-Hv1a toxin having an amino acid sequence according to the amino acid sequence set forth in SEQ ID NO: 61, and one of the following toxins: a Beauveria alba toxin; a Beauveria amorpha toxin; a Beauveria arenaria toxin; a Beauveria asiatica toxin; a Beauveria australis toxin; a Beauveria bassiana toxin; a Cordyceps bassiana toxin; a Beauveria brongniartii toxin; a Beauveria brumptii toxin; a Beauveria caledonica toxin; a Beauveria chiromensis toxin; a Beauveria coccorum toxin; a Beauveria cretacea toxin; a Beauveria cylindrospora toxin; a Beauveria delacroixii toxin; a Beauveria densa toxin; a Beauveria dependens toxin; a Beauveria doryphorae toxin; a Beauveria effusa toxin; a Beauveria epigaea toxin; a Beauveria felina toxin; a Beauveria geodes toxin; a Beauveria globulifera toxin; a Beauveria heimii toxin; a Beauveria hoplocheli toxin; a Beauveria kipukae toxin; a Beauveria laxa toxin; a Beauveria malawiensis toxin; a Beauveria medogensis toxin; a Beauveria melolonthae toxin; a Beauveria nubicola toxin; a Beauveria oryzae toxin; a Beauveria paradoxa toxin; a Beauveria paranensis toxin; a Beauveria parasitica toxin; a Beauveria petelotii toxin; a Beauveria pseudobassiana toxin; a Beauveria rileyi toxin; a Beauveria rubra toxin; a Beauveria shiotae toxin; a Beauveria sobolifera toxin; a Beauveria spicata toxin; a Beauveria stephanoderis toxin; a Beauveria sulfurescens toxin; a Beauveria sungii toxin; a Beauveria tenella toxin; a Beauveria tundrensis toxin; a Beauveria velata toxin; a Beauveria varroae toxin; a Beauveria vermiconia toxin; a Beauveria vexans toxin; a Beauveria viannai toxin; or a Beauveria virella toxin.

[1371] In some embodiments, a combination or composition comprises, consists essentially of, or consists of: a U+2-ACTX-Hv1a toxin having an amino acid sequence according to the amino acid sequence set forth in SEQ ID NO: 61, and a Beauveria bassiana toxin.

[1372] In some embodiments, a combination or composition comprises, consists essentially of, or consists of: a U+2-ACTX-Hv1a toxin having an amino acid sequence according to the amino acid sequence set forth in SEQ ID NO: 61, and a Beauveria bassiana toxin, wherein the Beauveria bassiana toxin is beauvericin.

[1373] In some embodiments, a combination or composition comprises, consists essentially of, or consists of: a U+2-ACTX-Hv1a toxin having an amino acid sequence according to the amino acid sequence set forth in SEQ ID NO: 61, and beauvericin, wherein the beauvericin has the chemical formula C₄₅H₅₇N₃O₉.

[1374] In some embodiments, a combination or composition comprises, consists essentially of, or consists of: a U+2-ACTX-Hv1a toxin having an amino acid sequence according to the amino acid sequence set forth in SEQ ID NO: 61, and beauvericin, wherein the beauvericin is a “Beauvericin A” toxin having the chemical formula C₄₆H₅₉N₃O₉.

[1375] In some embodiments, a combination or composition comprises, consists essentially of, or consists of: a U+2-ACTX-Hv1a toxin having an amino acid sequence according to the amino acid sequence set forth in SEQ ID NO: 61, and a Beauveria toxin, wherein the beauvericin toxin is a beauvericin toxin having the chemical formula C₄₅H₅₇N₃O₉; a beauvericin A toxin having the chemical formula C₄₆H₅₉N₃O₉; or a beauvericin B toxin having the chemical formula C₄₇H₆₁N₃O₉.

[1376] In some embodiments, a combination or composition comprises, consists essentially of, or consists of: a U+2-ACTX-Hv1a toxin having an amino acid sequence according to the amino acid sequence set forth in SEQ ID NO: 61, and beauvericin, wherein the beauvericin is a “Beauvericin B” toxin having the chemical formula C₄₇H₆₁N₃O₉.

[1377] In some embodiments, a combination or composition comprises, consists essentially of, or consists of: a U+2-ACTX-Hv1a toxin having an amino acid sequence according to the amino acid sequence set forth in SEQ ID NO: 61, and a Beauveria bassiana organism.

[1378] In some embodiments, a combination or composition comprises, consists essentially of, or consists of: a U+2-ACTX-Hv1a toxin having an amino acid sequence according to the amino acid sequence set forth in SEQ ID NO: 61, and a spore isolated from a Beauveria bassiana organism.

[1379] In some embodiments, a combination or composition comprises, consists essentially of, or consists of: a U+2-ACTX-Hv1a toxin having an amino acid sequence according to the amino acid sequence set forth in SEQ ID NO: 61, and a Beauveria bassiana organism, wherein the Beauveria bassiana organism is a Beauveria bassiana strain ANT-03.

[1380] In some embodiments, a combination or composition comprises, consists essentially of, or consists of: a U+2-ACTX-Hv1a toxin having an amino acid sequence according to the amino acid sequence set forth in SEQ ID NO: 61, and a spore isolated from a Beauveria bassiana organism, wherein the Beauveria bassiana spore is a Beauveria bassiana strain ANT-03 spore.

[1381] In some embodiments, a combination or composition comprises, consists essentially of, or consists of: a U+2-ACTX-Hv1a toxin having an amino acid sequence according to the amino acid sequence set forth in SEQ ID NO: 61, and a an Ascomycete fungal toxin.

[1382] In some embodiments, a combination or composition comprises, consists essentially of, or consists of: a U+2-ACTX-Hv1a toxin having an amino acid sequence according to the amino acid sequence set forth in SEQ ID NO: 61, and a Cordycipitaceae family fungal toxin.

[1383] In some embodiments, a combination or composition comprises, consists essentially of, or consists of: a U+2-ACTX-Hv1a toxin having an amino acid sequence according to the amino acid sequence set forth in SEQ ID NO: 61, and a an Akanthomyces toxin; an Ascopolyporus toxin; a Beauveria toxin; a Beejasamuha toxin; a Cordyceps toxin; a Coremiopsis toxin; a Engyodontium toxin; a Gibellula toxin; a Hyperdermium toxin; a Insecticola toxin; a Isaria toxin; a Lecanicillium toxin; a Microhilum toxin; a Phytocordyceps toxin; a Pseudogibellula toxin; a Rotiferophthora toxin; a Simplicillium toxin; or a Torrubiella toxin.

[1384] In some embodiments, a combination or composition comprises, consists essentially of, or consists of: a Beauveria bassiana strain ANT-03 spore, and a U+2-ACTX-Hv1a toxin having an amino acid sequence according to the amino acid sequence set forth in SEQ ID NO: 61.

[1385] In some embodiments, a combination or composition comprises, consists essentially of, or consists of: a U+2-ACTX-Hv1a toxin having an amino acid sequence according to the amino acid sequence set forth in SEQ ID NO: 61, and a Beauveria bassiana strain ANT-03 spore, wherein the combination or composition comprises a concentration of the Beauveria bassiana strain ANT-03 spore ranging from about 0.0001% w/w, 0.0005% w/w, 0.001% w/w, 0.005% w/w, 0.01% w/w, 0.02% w/w, 0.03% w/w, 0.04% w/w, 0.05% w/w, 0.06% w/w, 0.07% w/w, 0.08% w/w, 0.09% w/w, 0.1% w/w, 0.2% w/w, 0.3% w/w, 0.4% w/w, 0.5% w/w, 0.6% w/w, 0.7% w/w, 0.8% w/w, 0.9% w/w, 1% w/w, 2% w/w, 3% w/w, 4% w/w, 5% w/w, 6% w/w, 7% w/w, 8% w/w, 9% w/w, 10% w/w, 11% w/w, 12% w/w, 13% w/w, 14% w/w, 15% w/w, 16% w/w, 17% w/w, 18% w/w, 19% w/w, 20% w/w, 21% w/w, 22% w/w, 23% w/w, 24% w/w, 25% w/w, 26% w/w, 27% w/w, 28% w/w, 29% w/w, 30% w/w, 31% w/w, 32% w/w, 33% w/w, 34% w/w, 35% w/w, 36% w/w, 37% w/w, 38% w/w, 39% w/w, 40% w/w, 41% w/w, 42% w/w, 43% w/w, 44% w/w, 45% w/w, 46% w/w, 47% w/w, 48% w/w, 49% w/w, 50% w/w, 51% w/w, 52% w/w, 53% w/w, 54% w/w, 55% w/w, 56% w/w, 57% w/w, 58% w/w, 59% w/w, 60% w/w, 61% w/w, 62% w/w, 63% w/w, 64% w/w, 65% w/w, 66% w/w, 67% w/w, 68% w/w, 69% w/w, 70% w/w, 71% w/w, 72% w/w, 73% w/w, 74% w/w, 75% w/w, 76% w/w, 77% w/w, 78% w/w, 79% w/w, 80% w/w, 81% w/w, 82% w/w, 83% w/w, 84% w/w, 85% w/w, 86% w/w, 87% w/w, 88% w/w, 89% w/w, 90% w/w, 91% w/w, 92% w/w, 93% w/w, 94% w/w, 95% w/w, 96% w/w, 97% w/w, 98% w/w, 99% w/w, 99.1% w/w, 99.2% w/w, 99.3% w/w, 99.4% w/w, 99.5% w/w, 99.6% w/w, 99.7% w/w, 99.8% w/w, or about 99.9% w/w of the total composition.

[1386] In some embodiments, a combination or composition comprises, consists essentially of, or consists of: a U+2-ACTX-Hv1a toxin having an amino acid sequence according to the amino acid sequence set forth in SEQ ID NO: 61, and a Beauveria bassiana strain ANT-03 spore, wherein the combination or composition comprises a concentration of the U+2-ACTX-Hv1a toxin having an amino acid sequence according to the amino acid sequence set forth in SEQ ID NO: 61 ranging from about 0.0001% w/w, 0.0005% w/w, 0.001% w/w, 0.005% w/w, 0.01% w/w, 0.02% w/w, 0.03% w/w, 0.04% w/w, 0.05% w/w, 0.06% w/w, 0.07% w/w, 0.08% w/w, 0.09% w/w, 0.1% w/w, 0.2% w/w, 0.3% w/w, 0.4% w/w, 0.5% w/w, 0.6% w/w, 0.7% w/w, 0.8% w/w, 0.9% w/w, 1% w/w, 2% w/w, 3% w/w, 4% w/w, 5% w/w, 6% w/w, 7% w/w, 8% w/w, 9% w/w, 10% w/w, 11% w/w, 12% w/w, 13% w/w, 14% w/w, 15% w/w, 16% w/w, 17% w/w, 18% w/w, 19% w/w, 20% w/w, 21% w/w, 22% w/w, 23% w/w, 24% w/w, 25% w/w, 26% w/w, 27% w/w, 28% w/w, 29% w/w, 30% w/w, 31% w/w, 32% w/w, 33% w/w, 34% w/w, 35% w/w, 36% w/w, 37% w/w, 38% w/w, 39% w/w, 40% w/w, 41% w/w, 42% w/w, 43% w/w, 44% w/w, 45% w/w, 46% w/w, 47% w/w, 48% w/w, 49% w/w, 50% w/w, 51% w/w, 52% w/w, 53% w/w, 54% w/w, 55% w/w, 56% w/w, 57% w/w, 58% w/w, 59% w/w, 60% w/w, 61% w/w, 62% w/w, 63% w/w, 64% w/w, 65% w/w, 66% w/w, 67% w/w, 68% w/w, 69% w/w, 70% w/w, 71% w/w, 72% w/w, 73% w/w, 74% w/w, 75% w/w, 76% w/w, 77% w/w, 78% w/w, 79% w/w, 80% w/w, 81% w/w, 82% w/w, 83% w/w, 84% w/w, 85% w/w, 86% w/w, 87% w/w, 88% w/w, 89% w/w, 90% w/w, 91% w/w, 92% w/w, 93% w/w, 94% w/w, 95% w/w, 96% w/w, 97% w/w, 98% w/w, 99% w/w, 99.1% w/w, 99.2% w/w, 99.3% w/w, 99.4% w/w, 99.5% w/w, 99.6% w/w, 99.7% w/w, 99.8% w/w, or about 99.9% w/w of the total composition.

[1387] Combinations: Exemplary Combinations of Bt Toxins and U+2-ACTX-Hv1a

[1388] In some embodiments, a combination or composition comprises, consists essentially of, or consists of: a U+2-ACTX-Hv1a toxin having an amino acid sequence according to the amino acid sequence set forth in SEQ ID NO: 61, and a bacterial toxin, wherein the bacterial toxin is a Bacillus thuringiensis (Bt) toxin.

[1389] In some embodiments, a combination or composition comprises, consists essentially of, or consists of: a U+2-ACTX-Hv1a toxin having an amino acid sequence according to the amino acid sequence set forth in SEQ ID NO: 61, and a Bt toxin, wherein the Bt toxin is one or more fermentation solids, spores, or toxins isolated from the group consisting of: Bacillus thuringiensis var. kurstaki (Btk); Bacillus thuringiensis var. tenebrionis (Btt); Bacillus thuringiensis var. israelensis (Bti); Bacillus thuringiensis var. aizawai; Bacillus thuringiensis var. aizawai/pacificus; Bacillus thuringiensis var. alesti; Bacillus thuringiensis var. amagiensis; Bacillus thuringiensis var. andalousiensis; Bacillus thuringiensis var. argentinensis; Bacillus thuringiensis var. asturiensis; Bacillus thuringiensis var. azorensis; Bacillus thuringiensis var. balearica; Bacillus thuringiensis var. berliner; Bacillus thuringiensis var. bolivia; Bacillus thuringiensis var. brasilensis; Bacillus thuringiensis var. cameroun; Bacillus thuringiensis var. canadensis; Bacillus thuringiensis var. chanpaisis; Bacillus thuringiensis var. chinensis; Bacillus thuringiensis var. colmeri; Bacillus thuringiensis var. coreanensis; Bacillus thuringiensis var. dakota; Bacillus thuringiensis var. darmstadiensis; Bacillus thuringiensis var. dendrolimus; Bacillus thuringiensis var. entomocidus; Bacillus thuringiensis var. entomocidus/subtoxicus; Bacillus thuringiensis var. finitimus; Bacillus thuringiensis var. fukuokaensis; Bacillus thuringiensis var. galechiae; Bacillus thuringiensis var. galleriae; Bacillus thuringiensis var. graciosensis; Bacillus thuringiensis var. guiyangiensis; Bacillus thuringiensis var. higo; Bacillus thuringiensis var. huazhongensis; Bacillus thuringiensis var. iberica; Bacillus thuringiensis var. indiana; Bacillus thuringiensis var. israelensis/tochigiensis; Bacillus thuringiensis var. japonensis; Bacillus thuringiensis var. jegathesan; Bacillus thuringiensis var. jinghongiensis; Bacillus thuringiensis var. kenyae; Bacillus thuringiensis var. kim; Bacillus thuringiensis var. kumamtoensis; Bacillus thuringiensis var. kunthalanags3; Bacillus thuringiensis var. kunthalaRX24; Bacillus thuringiensis var. kunthalaRX27; Bacillus thuringiensis var. kunthalaRX28; Bacillus thuringiensis var. kyushuensis; Bacillus thuringiensis var. leesis; Bacillus thuringiensis var. londrina; Bacillus thuringiensis var. malayensis; Bacillus thuringiensis var. medellin; Bacillus thuringiensis var. mexicanensis; Bacillus thuringiensis var. mogi; Bacillus thuringiensis var. monterrey; Bacillus thuringiensis var. morrisoni; Bacillus thuringiensis var. muju; Bacillus thuringiensis var. navarrensis; Bacillus thuringiensis var. neoleonensis; Bacillus thuringiensis var. nigeriensis; Bacillus thuringiensis var. novosibirsk; Bacillus thuringiensis var. ostriniae; Bacillus thuringiensis var. oswaldocruzi; Bacillus thuringiensis var. pahangi; Bacillus thuringiensis var. pakistani; Bacillus thuringiensis var. palmanyolensis; Bacillus thuringiensis var. pingluonsis; Bacillus thuringiensis var. pirenaica; Bacillus thuringiensis var. poloniensis; Bacillus thuringiensis var. pondicheriensis; Bacillus thuringiensis var. pulsiensis; Bacillus thuringiensis var. rongseni; Bacillus thuringiensis var. roskildiensis; Bacillus thuringiensis var. san diego; Bacillus thuringiensis var. seoulensis; Bacillus thuringiensis var. shandongiensis; Bacillus thuringiensis var. silo; Bacillus thuringiensis var. sinensis; Bacillus thuringiensis var. sooncheon; Bacillus thuringiensis var. sotto; Bacillus thuringiensis var. sotto/dendrolimus; Bacillus thuringiensis var. subtoxicus; Bacillus thuringiensis var. sumiyoshiensis; Bacillus thuringiensis var. sylvestriensis; Bacillus thuringiensis var. thailandensis; Bacillus thuringiensis var. thompsoni; Bacillus thuringiensis var. thuringiensis; Bacillus thuringiensis var. tochigiensis; Bacillus thuringiensis var. toguchini; Bacillus thuringiensis var. tohokuensis; Bacillus thuringiensis var. tolworthi; Bacillus thuringiensis var. toumanoffi; Bacillus thuringiensis var. vazensis; Bacillus thuringiensis var. wratislaviensis; Bacillus thuringiensis var. wuhanensis; Bacillus thuringiensis var. xiaguangiensis; Bacillus thuringiensis var. yosoo; Bacillus thuringiensis var. yunnanensis; Bacillus thuringiensis var. zhaodongensis; and Bacillus thuringiensis var. konkukian toxin.

[1390] In some embodiments, a combination or composition comprises, consists essentially of, or consists of: a U+2-ACTX-Hv1a toxin having an amino acid sequence according to the amino acid sequence set forth in SEQ ID NO: 61, and a Bt toxin, wherein the Bt toxin is one or more fermentation solids, spores, or toxins isolated from the group consisting of: Bacillus thuringiensis var. kurstaki (Btk); Bacillus thuringiensis var. tenebrionis (Btt); and Bacillus thuringiensis var. israelensis (Bti).

[1391] In some embodiments, a combination or composition comprises, consists essentially of, or consists of: a U+2-ACTX-Hv1a toxin having an amino acid sequence according to the amino acid sequence set forth in SEQ ID NO: 61, and a Bt toxin, wherein the Bt toxin is a parasporal crystal toxin, a secreted protein, a β-exotoxin, a 41.9-kDa insecticidal toxin, a sphaericolysin, an alveolysin, or an enhancin-like protein.

[1392] In some embodiments, a combination or composition comprises, consists essentially of, or consists of: a U+2-ACTX-Hv1a toxin having an amino acid sequence according to the amino acid sequence set forth in SEQ ID NO: 61, and a parasporal crystal toxin, wherein the parasporal crystal toxin is a δ-endotoxin.

[1393] In some embodiments, a combination or composition comprises, consists essentially of, or consists of: a U+2-ACTX-Hv1a toxin having an amino acid sequence according to the amino acid sequence set forth in SEQ ID NO: 61, and a δ-endotoxin, wherein the δ-endotoxin is a Three-domain (3D) Cry family protein, a binary Bin-like family toxin, an ETX_MTX2-like family toxin, a Toxin-10 family toxin, an Aerolysin family toxin, or a cytolysin.

[1394] In some embodiments, a combination or composition comprises, consists essentially of, or consists of: a U+2-ACTX-Hv1a toxin having an amino acid sequence according to the amino acid sequence set forth in SEQ ID NO: 61, and a δ-endotoxin, wherein the δ-endotoxin is a Three-domain (3D) Cry toxin, a mosquitocidal Cry toxin (Mtx), a binary-like (Bin) toxin, or a Cyt toxin.

[1395] In some embodiments, a combination or composition comprises, consists essentially of, or consists of: a U+2-ACTX-Hv1a toxin having an amino acid sequence according to the amino acid sequence set forth in SEQ ID NO: 61, and a δ-endotoxin, wherein the δ-endotoxin is a Three-domain (3D) Cry toxin or a Cyt toxin.

[1396] In some embodiments, a combination or composition comprises, consists essentially of, or consists of: a U+2-ACTX-Hv1a toxin having an amino acid sequence according to the amino acid sequence set forth in SEQ ID NO: 61, and a δ-endotoxin, wherein the δ-endotoxin is selected from the group consisting of: Cry1Aa1, Cry1Aa2, Cry1Aa3, Cry1Aa4, Cry1Aa5, Cry1Aa6, Cry1Aa7, Cry1Aa8, Cry1Aa9, Cry1Aa10, Cry1Aa11, Cry1Aa12, Cry1Aa13, Cry1Aa14, Cry1Aa15, Cry1Aa16, Cry1Aa17, Cry1Aa18, Cry1Aa19, Cry1Aa20, Cry1Aa21, Cry1Aa22, Cry1Aa23, Cry1Aa24, Cry1Aa25, Cry1Ab1, Cry1Ab2, Cry1Ab3, Cry1Ab4, Cry1Ab5, Cry1Ab6, Cry1Ab7, Cry1Ab8, Cry1Ab9, Cry1Ab10, Cry1Ab11, Cry1Ab12, Cry1Ab13, Cry1Ab14, Cry1Ab15, Cry1Ab16, Cry1Ab17, Cry1Ab18, Cry1Ab19, Cry1Ab20, Cry1Ab21, Cry1Ab22, Cry1Ab23, Cry1Ab24, Cry1Ab25, Cry1Ab26, Cry1Ab27, Cry1Ab28, Cry1Ab29, Cry1Ab30, Cry1Ab31, Cry1Ab32, Cry1Ab33, Cry1Ab34, Cry1Ab35, Cry1Ab36, Cry1Ab-like, Cry1Ab-like, Cry1Ab-like, Cry1Ab-like, Cry1Aa1, Cry1Ac2, Cry1Ac3, Cry1Ac4, Cry1Ac5, Cry1Ac6, Cry1Ac7, Cry1Ac8, Cry1Ac9, Cry1Ac10, Cry1Ac11, Cry1Ac12, Cry1Ac13, Cry1Ac14, Cry1Ac15, Cry1Ac16, Cry1Ac17, Cry1Ac18, Cry1Ac19, Cry1Ac20, Cry1Ac21, Cry1Ac22, Cry1Ac23, Cry1Ac24, Cry1Ac25, Cry1Ac26, Cry1Ac27, Cry1Ac28, Cry1Ac29, Cry1Ac30, Cry1Ac31, Cry1Ac32, Cry1Ac33, Cry1Ac34, Cry1Ac35, Cry1Ac36, Cry1Ac37, Cry1Ac38, Cry1Ac39, Cry1Ad1, Cry1Ad2, Cry1Ae1, Cry1Af1, Cry1Ag1, Cry1Ah1, Cry1Ah2, Cry1Ah3, Cry1Ai1, Cry1Ai2, Cry1Aj1, Cry1A-like, Cry1Ba1, Cry1Ba2, Cry1Ba3, Cry1Ba4, Cry1Ba5, Cry1Ba6, Cry1Ba7, Cry1Ba8, Cry1Bb1, Cry1Bb2, Cry1Bb3, Cry1Bc1, Cry1Bd1, Cry1Bd2, Cry1Bd3, Cry1Be1, Cry1Be2, Cry1Be3, Cry1Be4, Cry1Be5, Cry1Bf1, Cry1Bf2, Cry1Bg1, Cry1Bh1, Cry1Bi1, Cry1Bj1, Cry1Ca1, Cry1Ca2, Cry1Ca3, Cry1Ca4, Cry1Ca5, Cry1Ca6, Cry1Ca7, Cry1Ca8, Cry1Ca9, Cry1Ca10, Cry1Ca11, Cry1Ca12, Cry1Ca13, Cry1Ca14, Cry1Ca15, Cry1Cb1, Cry1Cb2, Cry1Cb3, Cry1Cb-like, Cry1Da1, Cry1Da2, Cry1Da3, Cry1Da4, Cry1Da5, Cry1db1, Cry1db2, Cry1Dc1, Cry1Dd1, Cry1Ea1, Cry1Ea2, Cry1Ea3, Cry1Ea4, Cry1Ea5, Cry1Ea6, Cry1Ea7, Cry1Ea8, Cry1Ea9, Cry1Ea10, Cry1Ea11, Cry1Ea12, Cry1Eb1, Cry1Fa1, Cry1Fa2, Cry1Fa3, Cry1Fa4, Cry1Fb1, Cry1Fb2, Cry1Fb3, Cry1Fb4, Cry1Fb5, Cry1Fb6, Cry1Fb7, Cry1Ga1, Cry1Ga2, Cry1Gb1, Cry1Gb2, Cry1Gc1, Cry1Ha1, Cry1Hb1, Cry1Hb2, Cry1Hc1, Cry1H-like, Cry1Ia1, Cry1Ia2, Cry1Ia3, Cry1Ia4, Cry1Ia5, Cry1Ia6, Cry1Ia7, Cry1Ia8, Cry1Ia9, Cry1Ia10, Cry1Ia11, Cry1Ia12, Cry1Ia13, Cry1Ia14, Cry1Ia15, Cry1Ia16, Cry1Ia17, Cry1Ia18, Cry1Ia19, Cry1Ia20, Cry1Ia21, Cry1Ia22, Cry1Ia23, Cry1Ia24, Cry1Ia25, Cry1Ia26, Cry1Ia27, Cry1Ia28, Cry1Ia29, Cry1Ia30, Cry1Ia31, Cry1Ia32, Cry1Ia33, Cry1Ia34, Cry1Ia35, Cry1Ia36, Cry1Ia37, Cry1Ia38, Cry1Ia39, Cry1Ia40, Cry1Ib1, Cry1Ib2, Cry1Ib3, Cry1Ib4, Cry1Ib5, Cry1Ib6, Cry1Ib7, Cry1Ib8, Cry1Ib9, Cry1Ib10, Cry1Ib11, Cry1Ic1, Cry1Ic2, Cry1Id1, Cry1Id2, Cry1Id3, Cry1Ie1, Cry1Ie2, Cry1Ie3, Cry1Ie4, Cry1Ie5, Cry1If1, Cry1Ig1, Cry1I-like, Cry1I-like, Cry1Ia1, Cry1Ja2, Cry1Ja3, Cry1Jb1, Cry1Jc1, Cry1Jc2, Cry1Jd1, Cry1Ka1, Cry1Ka2, Cry1La1, Cry1La2, Cry1La3, Cry1Ma1, Cry1Ma2, Cry1Na1, Cry1Na2, Cry1Na3, Cry1Nb1, Cry1-like, Cry2Aa1, Cry2Aa2, Cry2Aa3, Cry2Aa4, Cry2Aa5, Cry2Aa6, Cry2Aa7, Cry2Aa8, Cry2Aa9, Cry2Aa10, Cry2Aa11, Cry2Aa12, Cry2Aa13, Cry2Aa14, Cry2Aa15, Cry2Aa16, Cry2Aa17, Cry2Aa18, Cry2Aa19, Cry2Aa20, Cry2Aa21, Cry2Aa22, Cry2Aa23, Cry2Aa23, Cry2Aa25, Cry2Ab1, Cry2Ab2, Cry2Ab3, Cry2Ab4, Cry2Ab5, Cry2Ab6, Cry2Ab7, Cry2Ab8, Cry2Ab9, Cry2Ab10, Cry2Ab11, Cry2Ab12, Cry2Ab13, Cry2Ab14, Cry2Ab15, Cry2Ab16, Cry2Ab17, Cry2Ab18, Cry2Ab19, Cry2Ab20, Cry2Ab21, Cry2Ab22, Cry2Ab23, Cry2Ab24, Cry2Ab25, Cry2Ab26, Cry2Ab27, Cry2Ab28, Cry2Ab29, Cry2Ab30, Cry2Ab31, Cry2Ab32, Cry2Ab33, Cry2Ab34, Cry2Ab35, Cry2Ab36, Cry2Ac1, Cry2Ac2, Cry2Ac3, Cry2Ac4, Cry2Ac5, Cry2Ac6, Cry2Ac7, Cry2Ac8, Cry2Ac9, Cry2Ac10, Cry2Ac11, Cry2Ac12, Cry2Ad1, Cry2Ad2, Cry2Ad3, Cry2Ad4, Cry2Ad5, Cry2Ae1, Cry2Af1, Cry2Af2, Cry2Ag1, Cry2Ah1, Cry2Ah2, Cry2Ah3, Cry2Ah4, Cry2Ah5, Cry2Ah6, Cry2Ai1, Cry2Aj1, Cry2Ak1, Cry2A11, Cry2Ba1, Cry2Ba2, Cry3Aa1, Cry3Aa2, Cry3Aa3, Cry3Aa4, Cry3Aa5, Cry3Aa6, Cry3Aa7, Cry3Aa8, Cry3Aa9, Cry3Aa10, Cry3Aa11, Cry3Aa12, Cry3Ba1, Cry3Ba2, Cry3Ba3, Cry3Bb1, Cry3Bb2, Cry3Bb3, Cry3Ca1, Cry4Aa1, Cry4Aa2, Cry4Aa3, Cry4Aa4, Cry4A-like, Cry4Ba1, Cry4Ba2, Cry4Ba3, Cry4Ba4, Cry4Ba5, Cry4Ba-like, Cry4Ca1, Cry4Ca2, Cry4Cb1, Cry4Cb2, Cry4Cb3, Cry4Cc1, Cry5Aa1, Cry5Ab1, Cry5Ac1, Cry5Ad1, Cry5Ba1, Cry5Ba2, Cry5Ba3, Cry5Ca1, Cry5Ca2, Cry5Da1, Cry5Da2, Cry5Ea1, Cry5Ea2, Cry6Aa1, Cry6Aa2, Cry6Aa3, Cry6Ba1, Cry7Aa1, Cry7Aa2, Cry7Ab1, Cry7Ab2, Cry7Ab3, Cry7Ab4, Cry7Ab5, Cry7Ab6, Cry7Ab7, Cry7Ab8, Cry7Ab9, Cry7Ac1, Cry7Ba1, Cry7Bb1, Cry7Ca1, Cry7Cb1, Cry7Da1, Cry7Da2, Cry7Da3, Cry7Ea1, Cry7Ea2, Cry7Ea3, Cry7Fa1, Cry7Fa2, Cry7Fb1, Cry7Fb2, Cry7Fb3, Cry7Ga1, Cry7Ga2, Cry7Gb1, Cry7Gc1, Cry7Gd1, Cry7Ha1, Cry7Ia1, Cry7Ja1, Cry7Ka1, Cry7Kb1, Cry7La1, Cry8Aa1, Cry8Ab1, Cry8Ac1, Cry8Ad1, Cry8Ba1, Cry8Bb1, Cry8Bc1, Cry8Ca1, Cry8Ca2, Cry8Ca3, Cry8Ca4, Cry8Ca5, Cry8Da1, Cry8Da2, Cry8Da3, Cry8db1, Cry8Ea1, Cry8Ea2, Cry8Ea3, Cry8Ea4, Cry8Ea5, Cry8Ea6, Cry8Fa1, Cry8Fa2, Cry8Fa3, Cry8Fa4, Cry8Ga1, Cry8Ga2, Cry8Ga3, Cry8Ha1, Cry8Hb1, Cry8Ia1, Cry8Ia2, Cry8Ia3, Cry8Ia4, Cry8Ib1, Cry8Ib2, Cry8Ib3, Cry8Ja1, Cry8Ka1, Cry8Ka2, Cry8Ka3, Cry8Kb1, Cry8Kb2, Cry8Kb3, Cry8La1, Cry8Ma1, Cry8Ma2, Cry8Ma3, Cry8Na1, Cry8Pa1, Cry8Pa2, Cry8Pa3, Cry8Qa1, Cry8Qa2, Cry8Ra1, Cry8Sa1, Cry8Ta1, Cry8-like, Cry8-like, Cry9Aa1, Cry9Aa2, Cry9Aa3, Cry9Aa4, Cry9Aa5, Cry9Aa, like, Cry9Ba1, Cry9Ba2, Cry9Bb1, Cry9Ca1, Cry9Ca2, Cry9Cb1, Cry9Da1, Cry9Da2, Cry9Da3, Cry9Da4, Cry9db1, Cry9Dc1, Cry9Ea1, Cry9Ea2, Cry9Ea3, Cry9Ea4, Cry9Ea5, Cry9Ea6, Cry9Ea7, Cry9Ea8, Cry9Ea9, Cry9Ea10, Cry9Ea11, Cry9Eb1, Cry9Eb2, Cry9Eb3, Cry9Ec1, Cry9Ed1, Cry9Ee1, Cry9Ee2, Cry9Fa1, Cry9Ga1, Cry9-like, Cry10Aa1, Cry10Aa2, Cry10Aa3, Cry10Aa4, Cry10A-like, Cry11Aa1, Cry11Aa2, Cry11Aa3, Cry11Aa4, Cry11Aa5, Cry11Aa-like, Cry11Ba1, Cry11Bb1, Cry11Bb2, Cry12Aa1, Cry13Aa1, Cry13Aa2, Cry14Aa1, Cry14Ab1, Cry15Aa1, Cry16Aa1, Cry17Aa1, Cry18Aa1, Cry18Ba1, Cry18Ca1, Cry19Aa1, Cry19Ba1, Cry19Ca1, Cry20Aa1, Cry20Ba1, Cry20Ba2, Cry20-like, Cry21Aa1, Cry21Aa2, Cry21Aa3, Cry21Ba1, Cry21Ca1, Cry21Ca2, Cry21Da1, Cry21Ea1, Cry21Fa1, Cry21Ga1, Cry21Ha1, Cry22Aa1, Cry22Aa2, Cry22Aa3, Cry22Ab1, Cry22Ab2, Cry22Ba1, Cry22Bb1, Cry23Aa1, Cry24Aa1, Cry24Ba1, Cry24Ca1, Cry24Da1, Cry25Aa1, Cry26Aa1, Cry27Aa1, Cry28Aa1, Cry28Aa2, Cry29Aa1, Cry29Ba1, Cry30Aa1, Cry30Ba1, Cry30Ca1, Cry30Ca2, Cry30Da1, Cry30db1, Cry30Ea1, Cry30Ea2, Cry30Ea3, Cry30Ea4, Cry30Fa1, Cry30Ga1, Cry30Ga2, Cry31Aa1, Cry31Aa2, Cry31Aa3, Cry31Aa4, Cry31Aa5, Cry31Aa6, Cry31Ab1, Cry31Ab2, Cry31Ac1, Cry31Ac2, Cry31Ad1, Cry31Ad2, Cry32Aa1, Cry32Aa2, Cry32Ab1, Cry32Ba1, Cry32Ca1, Cry32Cb1, Cry32Da1, Cry32Ea1, Cry32Ea2, Cry32Eb1, Cry32Fa1, Cry32Ga1, Cry32Ha1, Cry32Hb1, Cry32Ia1, Cry32Ja1, Cry32Ka1, Cry32La1, Cry32Ma1, Cry32 Mb1, Cry32Na1, Cry32Oa1, Cry32Pa1, Cry32Qa1, Cry32Ra1, Cry32Sa1, Cry32Ta1, Cry32Ua1, Cry32Va1, Cry32Wa1, Cry32Wa2, Cry32Xa1, Cry32Ya1, Cry33Aa1, Cry34Aa1, Cry34Aa2, Cry34Aa3, Cry34Aa4, Cry34Ab1, Cry34Ac1, Cry34Ac2, Cry34Ac3, Cry34Ba1, Cry34Ba2, Cry34Ba3, Cry35Aa1, Cry35Aa2, Cry35Aa3, Cry35Aa4, Cry35Ab1, Cry35Ab2, Cry35Ab3, Cry35Ac1, Cry35Ba1, Cry35Ba2, Cry35Ba3, Cry36Aa1, Cry37Aa1, Cry38Aa1, Cry39Aa1, Cry40Aa1, Cry40Ba1, Cry40Ca1, Cry40Da1, Cry41Aa1, Cry41Ab1, Cry41Ba1, Cry41Ba2, Cry41Ca1, Cry42Aa1, Cry43Aa1, Cry43Aa2, Cry43Ba1, Cry43Ca1, Cry43Cb1, Cry43Cc1, Cry43-like, Cry44Aa1, Cry45Aa1, Cry45Ba1, Cry46Aa1, Cry46Aa2, Cry46Ab1, Cry47Aa1, Cry48Aa1, Cry48Aa2, Cry48Aa3, Cry48Ab1, Cry48Ab2, Cry49Aa1, Cry49Aa2, Cry49Aa3, Cry49Aa4, Cry49Ab1, Cry50Aa1, Cry50Ba1, Cry50Ba2, Cry51Aa1, Cry51Aa2, Cry52Aa1, Cry52Ba1, Cry52Ca1, Cry53Aa1, Cry53Ab1, Cry54Aa1, Cry54Aa2, Cry54Ab1, Cry54Ba1, Cry54Ba2, Cry55Aa1, Cry55Aa2, Cry55Aa3, Cry56Aa1, Cry56Aa2, Cry56Aa3, Cry56Aa4, Cry57Aa1, Cry57Ab1, Cry58Aa1, Cry59Ba1, Cry59Aa1, Cry60Aa1, Cry60Aa2, Cry60Aa3, Cry60Ba1, Cry60Ba2, Cry60Ba3, Cry61Aa1, Cry61Aa2, Cry61Aa3, Cry62Aa1, Cry63Aa1, Cry64Aa1, Cry64Ba1, Cry64Ca1, Cry65Aa1, Cry65Aa2, Cry66Aa1, Cry66Aa2, Cry67Aa1, Cry67Aa2, Cry68Aa1, Cry69Aa1, Cry69Aa2, Cry69Ab1, Cry70Aa1, Cry70Ba1, Cry70Bb1, Cry71Aa1, Cry72Aa1, Cry72Aa2, Cry73Aa1, Cry74Aa, Cry75Aa1, Cry75Aa2, Cry75Aa3, Cry76Aa1, Cry77Aa1, or Cry78Aa1, Cyt1Aa1, Cyt1Aa2, Cyt1Aa3, Cyt1Aa4, Cyt1Aa5, Cyt1Aa6, Cyt1Aa7, Cyt1Aa8, Cyt1Aa-like, Cyt1Ab1, Cyt1Ba1, Cyt1Ca1, Cyt1Da1, Cyt1Da2, Cyt2Aa1, Cyt2Aa2, Cyt2Aa3, Cyt2Aa4, Cyt2Ba1, Cyt2Ba2, Cyt2Ba3, Cyt2Ba4, Cyt2Ba5, Cyt2Ba6, Cyt2Ba7, Cyt2Ba8, Cyt2Ba9, Cyt2Ba10, Cyt2Ba11, Cyt2Ba12, Cyt2Ba13, Cyt2Ba14, Cyt2Ba15, Cyt2Ba16, Cyt2Ba-like, Cyt2Bb1, Cyt2Bc1, Cyt2B-like, Cyt2Ca1, and Cyt3Aa1.

[1397] In some embodiments, a combination or composition comprises, consists essentially of, or consists of: a U+2-ACTX-Hv1a toxin having an amino acid sequence according to the amino acid sequence set forth in SEQ ID NO: 61, and a Cry toxin, or a Cyt toxin, wherein the Cry toxin or Cyt toxin has an amino acid sequence according to SEQ ID NOs: 412-481.

[1398] In some embodiments, a combination or composition comprises, consists essentially of, or consists of: a U+2-ACTX-Hv1a toxin having an amino acid sequence according to the amino acid sequence set forth in SEQ ID NO: 61, and a Bt toxin, wherein the Bt toxin is a secreted protein.

[1399] In some embodiments, a combination or composition comprises, consists essentially of, or consists of: a U+2-ACTX-Hv1a toxin having an amino acid sequence according to the amino acid sequence set forth in SEQ ID NO: 61, and a Bt toxin, wherein the Bt toxin is a secreted protein, wherein the secreted protein is a vegetative insecticidal protein (Vip), a secreted insecticidal protein (Sip), a Bin-like family protein, or an ETX_MTX2-family protein.

[1400] In some embodiments, a combination or composition comprises, consists essentially of, or consists of: a U+2-ACTX-Hv1a toxin having an amino acid sequence according to the amino acid sequence set forth in SEQ ID NO: 61, and a Bt toxin, wherein the Bt toxin is a secreted protein, and wherein the secreted protein is a Vip.

[1401] In some embodiments, a combination or composition comprises, consists essentially of, or consists of: a U+2-ACTX-Hv1a toxin having an amino acid sequence according to the amino acid sequence set forth in SEQ ID NO: 61, and a Vip, wherein the Vip is a Vip 1 family protein, a Vip 2 family protein, a Vip 3 family protein, or a Vip 4 family protein.

[1402] In some embodiments, a combination or composition comprises, consists essentially of, or consists of: a U+2-ACTX-Hv1a toxin having an amino acid sequence according to the amino acid sequence set forth in SEQ ID NO: 61, and a Vip, wherein the Vip is selected from the group consisting of: Vip1Aa1, Vip1Aa2, Vip1Aa3, Vip1Ab1, Vip1Ac1, Vip1Ad1, Vip1Ba1, Vip1Ba2, Vip1Bb1, Vip1Bb2, Vip1Bb3, Vip1Bc1, Vip1Ca1, Vip1Ca2, Vip1Da1, Vip2Aa1, Vip2Aa2, Vip2Aa3, Vip2Ab1, Vip2Ac1, Vip2Ac2, Vip2Ad1, Vip2Ae1, Vip2Ae2, Vip2Ae3, Vip2Af1, Vip2Af2, Vip2Ag1, Vip2Ag2, Vip2Ba1, Vip2Ba2, Vip2Bb1, Vip2Bb2, Vip2Bb3, Vip2Bb4, Vip3Aa1, Vip3Aa2, Vip3Aa3, Vip3Aa4, Vip3Aa5, Vip3Aa6, Vip3Aa7, Vip3Aa8, Vip3Aa9, Vip3Aa10, Vip3Aa11, Vip3Aa12, Vip3Aa13, Vip3Aa14, Vip3Aa15, Vip3Aa16, Vip3Aa17, Vip3Aa18, Vip3Aa19.0, Vip3Aa19, Vip3Aa20, Vip3Aa21, Vip3Aa22, Vip3Aa23, Vip3Aa24, Vip3Aa25, Vip3Aa26, Vip3Aa27, Vip3Aa28, Vip3Aa29, Vip3Aa30, Vip3Aa31, Vip3Aa32, Vip3Aa33, Vip3Aa34, Vip3Aa35, Vip3Aa36, Vip3Aa37, Vip3Aa38, Vip3Aa39, Vip3Aa40, Vip3Aa41, Vip3Aa42, Vip3Aa43, Vip3Aa44, Vip3Aa45, Vip3Aa46, Vip3Aa47, Vip3Aa48, Vip3Aa49, Vip3Aa50, Vip3Aa51, Vip3Aa52, Vip3Aa53, Vip3Aa54, Vip3Aa55, Vip3Aa56, Vip3Aa57, Vip3Aa58, Vip3Aa59, Vip3Aa60, Vip3Aa61, Vip3Aa62, Vip3Aa63, Vip3Aa64, Vip3Aa65, Vip3Aa66, Vip3Ab1, Vip3Ab2, Vip3Ac1, Vip3Ad1, Vip3Ad2, Vip3Ad3, Vip3Ad4, Vip3Ad5, Vip3Ad6, Vip3Ae1, Vip3Af1, Vip3Af2, Vip3Af3, Vip3Af4, Vip3Ag1, Vip3Ag2, Vip3Ag3, Vip3Ag4, Vip3Ag5, Vip3Ag6, Vip3Ag7, Vip3Ag8, Vip3Ag9, Vip3Ag10, Vip3Ag11, Vip3Ag12, Vip3Ag13, Vip3Ag14, Vip3Ag15, Vip3Ah1, Vip3Ah2, Vip3Ai1, Vip3Aj1, Vip3Aj2, Vip3Ba1, Vip3Ba2, Vip3Bb1, Vip3Bb2, Vip3Bb3, Vip3Bc, Vip3Ca1, Vip3Ca2, Vip3Ca3, Vip3Ca4, and Vip4Aa1.

[1403] In some embodiments, a combination or composition comprises, consists essentially of, or consists of: a U+2-ACTX-Hv1a toxin having an amino acid sequence according to the amino acid sequence set forth in SEQ ID NO: 61, and a Vip, wherein the Vip protein has an amino acid sequence according to the amino acid sequence set forth in SEQ ID NOs: 482-587.

[1404] In some embodiments, a combination or composition comprises, consists essentially of, or consists of: one or more fermentation solids, spores, or toxins isolated from a Bacillus thuringiensis ssp. kurstaki strain EVB-113-19; a Bacillus thuringiensis ssp. tenebrionis strain NB-176; or a Bacillus thuringiensis ssp. israelensis strain BMP 144; and a U+2-ACTX-Hv1a toxin having an amino acid sequence according to the amino acid sequence set forth in SEQ ID NO: 61.

[1405] In some embodiments, a combination or composition comprises, consists essentially of, or consists of: one or more fermentation solids, spores, or toxins isolated from a Bacillus thuringiensis ssp. tenebrionis strain NB-176, and a U+2-ACTX-Hv1a toxin having an amino acid sequence according to the amino acid sequence set forth in SEQ ID NO: 61.

[1406] In some embodiments, a combination or composition comprises, consists essentially of, or consists of: one or more fermentation solids, spores, or toxins isolated from a Bacillus thuringiensis ssp. kurstaki strain EVB-113-19, and a U+2-ACTX-Hv1a toxin having an amino acid sequence according to the amino acid sequence set forth in SEQ ID NO: 61.

[1407] In some embodiments, a combination or composition comprises, consists essentially of, or consists of: one or more fermentation solids, spores, or toxins isolated from a Bacillus thuringiensis ssp. israelensis strain BMP 144, and a U+2-ACTX-Hv1a toxin having an amino acid sequence according to the amino acid sequence set forth in SEQ ID NO: 61.

[1408] In some embodiments, a combination or composition comprises, consists essentially of, or consists of: a U+2-ACTX-Hv1a toxin having an amino acid sequence according to the amino acid sequence set forth in SEQ ID NO: 61, and one or more fermentation solids, spores, or toxins isolated from a Bacillus thuringiensis ssp. israelensis strain BMP 144, wherein the combination or composition comprises a concentration of the U+2-ACTX-Hv1a toxin having an amino acid sequence according to the amino acid sequence set forth in SEQ ID NO: 61 ranging from about 0.0001% w/w, 0.0005% w/w, 0.001% w/w, 0.005% w/w, 0.01% w/w, 0.02% w/w, 0.03% w/w, 0.04% w/w, 0.05% w/w, 0.06% w/w, 0.07% w/w, 0.08% w/w, 0.09% w/w, 0.1% w/w, 0.2% w/w, 0.3% w/w, 0.4% w/w, 0.5% w/w, 0.6% w/w, 0.7% w/w, 0.8% w/w, 0.9% w/w, 1% w/w, 2% w/w, 3% w/w, 4% w/w, 5% w/w, 6% w/w, 7% w/w, 8% w/w, 9% w/w, 10% w/w, 11% w/w, 12% w/w, 13% w/w, 14% w/w, 15% w/w, 16% w/w, 17% w/w, 18% w/w, 19% w/w, 20% w/w, 21% w/w, 22% w/w, 23% w/w, 24% w/w, 25% w/w, 26% w/w, 27% w/w, 28% w/w, 29% w/w, 30% w/w, 31% w/w, 32% w/w, 33% w/w, 34% w/w, 35% w/w, 36% w/w, 37% w/w, 38% w/w, 39% w/w, 40% w/w, 41% w/w, 42% w/w, 43% w/w, 44% w/w, 45% w/w, 46% w/w, 47% w/w, 48% w/w, 49% w/w, 50% w/w, 51% w/w, 52% w/w, 53% w/w, 54% w/w, 55% w/w, 56% w/w, 57% w/w, 58% w/w, 59% w/w, 60% w/w, 61% w/w, 62% w/w, 63% w/w, 64% w/w, 65% w/w, 66% w/w, 67% w/w, 68% w/w, 69% w/w, 70% w/w, 71% w/w, 72% w/w, 73% w/w, 74% w/w, 75% w/w, 76% w/w, 77% w/w, 78% w/w, 79% w/w, 80% w/w, 81% w/w, 82% w/w, 83% w/w, 84% w/w, 85% w/w, 86% w/w, 87% w/w, 88% w/w, 89% w/w, 90% w/w, 91% w/w, 92% w/w, 93% w/w, 94% w/w, 95% w/w, 96% w/w, 97% w/w, 98% w/w, 99% w/w, 99.1% w/w, 99.2% w/w, 99.3% w/w, 99.4% w/w, 99.5% w/w, 99.6% w/w, 99.7% w/w, 99.8% w/w, or about 99.9% w/w of the total composition.

[1409] In some embodiments, a combination or composition comprises, consists essentially of, or consists of: a U+2-ACTX-Hv1a toxin having an amino acid sequence according to the amino acid sequence set forth in SEQ ID NO: 61, and one or more fermentation solids, spores, or toxins isolated from a Bacillus thuringiensis ssp. israelensis strain BMP 144, wherein the combination or composition comprises a concentration of the one or more fermentation solids, spores, or toxins isolated from a Bacillus thuringiensis ssp. israelensis strain BMP 144 ranging from about 0.0001% w/w, 0.0005% w/w, 0.001% w/w, 0.005% w/w, 0.01% w/w, 0.02% w/w, 0.03% w/w, 0.04% w/w, 0.05% w/w, 0.06% w/w, 0.07% w/w, 0.08% w/w, 0.09% w/w, 0.1% w/w, 0.2% w/w, 0.3% w/w, 0.4% w/w, 0.5% w/w, 0.6% w/w, 0.7% w/w, 0.8% w/w, 0.9% w/w, 1% w/w, 2% w/w, 3% w/w, 4% w/w, 5% w/w, 6% w/w, 7% w/w, 8% w/w, 9% w/w, 10% w/w, 11% w/w, 12% w/w, 13% w/w, 14% w/w, 15% w/w, 16% w/w, 17% w/w, 18% w/w, 19% w/w, 20% w/w, 21% w/w, 22% w/w, 23% w/w, 24% w/w, 25% w/w, 26% w/w, 27% w/w, 28% w/w, 29% w/w, 30% w/w, 31% w/w, 32% w/w, 33% w/w, 34% w/w, 35% w/w, 36% w/w, 37% w/w, 38% w/w, 39% w/w, 40% w/w, 41% w/w, 42% w/w, 43% w/w, 44% w/w, 45% w/w, 46% w/w, 47% w/w, 48% w/w, 49% w/w, 50% w/w, 51% w/w, 52% w/w, 53% w/w, 54% w/w, 55% w/w, 56% w/w, 57% w/w, 58% w/w, 59% w/w, 60% w/w, 61% w/w, 62% w/w, 63% w/w, 64% w/w, 65% w/w, 66% w/w, 67% w/w, 68% w/w, 69% w/w, 70% w/w, 71% w/w, 72% w/w, 73% w/w, 74% w/w, 75% w/w, 76% w/w, 77% w/w, 78% w/w, 79% w/w, 80% w/w, 81% w/w, 82% w/w, 83% w/w, 84% w/w, 85% w/w, 86% w/w, 87% w/w, 88% w/w, 89% w/w, 90% w/w, 91% w/w, 92% w/w, 93% w/w, 94% w/w, 95% w/w, 96% w/w, 97% w/w, 98% w/w, 99% w/w, 99.1% w/w, 99.2% w/w, 99.3% w/w, 99.4% w/w, 99.5% w/w, 99.6% w/w, 99.7% w/w, 99.8% w/w, or about 99.9% w/w of the total composition.

[1410] In some embodiments, a combination or composition comprises, consists essentially of, or consists of: a U+2-ACTX-Hv1a toxin having an amino acid sequence according to the amino acid sequence set forth in SEQ ID NO: 61, and one or more fermentation solids, spores, or toxins isolated from a Bacillus thuringiensis ssp. kurstaki strain EVB-113-19, wherein the combination or composition comprises a concentration of the U+2-ACTX-Hv1a toxin having an amino acid sequence according to the amino acid sequence set forth in SEQ ID NO: 61 ranging from about 0.0001% w/w, 0.0005% w/w, 0.001% w/w, 0.005% w/w, 0.01% w/w, 0.02% w/w, 0.03% w/w, 0.04% w/w, 0.05% w/w, 0.06% w/w, 0.07% w/w, 0.08% w/w, 0.09% w/w, 0.1% w/w, 0.2% w/w, 0.3% w/w, 0.4% w/w, 0.5% w/w, 0.6% w/w, 0.7% w/w, 0.8% w/w, 0.9% w/w, 1% w/w, 2% w/w, 3% w/w, 4% w/w, 5% w/w, 6% w/w, 7% w/w, 8% w/w, 9% w/w, 10% w/w, 11% w/w, 12% w/w, 13% w/w, 14% w/w, 15% w/w, 16% w/w, 17% w/w, 18% w/w, 19% w/w, 20% w/w, 21% w/w, 22% w/w, 23% w/w, 24% w/w, 25% w/w, 26% w/w, 27% w/w, 28% w/w, 29% w/w, 30% w/w, 31% w/w, 32% w/w, 33% w/w, 34% w/w, 35% w/w, 36% w/w, 37% w/w, 38% w/w, 39% w/w, 40% w/w, 41% w/w, 42% w/w, 43% w/w, 44% w/w, 45% w/w, 46% w/w, 47% w/w, 48% w/w, 49% w/w, 50% w/w, 51% w/w, 52% w/w, 53% w/w, 54% w/w, 55% w/w, 56% w/w, 57% w/w, 58% w/w, 59% w/w, 60% w/w, 61% w/w, 62% w/w, 63% w/w, 64% w/w, 65% w/w, 66% w/w, 67% w/w, 68% w/w, 69% w/w, 70% w/w, 71% w/w, 72% w/w, 73% w/w, 74% w/w, 75% w/w, 76% w/w, 77% w/w, 78% w/w, 79% w/w, 80% w/w, 81% w/w, 82% w/w, 83% w/w, 84% w/w, 85% w/w, 86% w/w, 87% w/w, 88% w/w, 89% w/w, 90% w/w, 91% w/w, 92% w/w, 93% w/w, 94% w/w, 95% w/w, 96% w/w, 97% w/w, 98% w/w, 99% w/w, 99.1% w/w, 99.2% w/w, 99.3% w/w, 99.4% w/w, 99.5% w/w, 99.6% w/w, 99.7% w/w, 99.8% w/w, or about 99.9% w/w of the total composition.

[1411] In some embodiments, a combination or composition comprises, consists essentially of, or consists of: a U+2-ACTX-Hv1a toxin having an amino acid sequence according to the amino acid sequence set forth in SEQ ID NO: 61, and one or more fermentation solids, spores, or toxins isolated from a Bacillus thuringiensis ssp. kurstaki strain EVB-113-19, wherein the combination or composition comprises a concentration of the one or more fermentation solids, spores, or toxins isolated from a Bacillus thuringiensis ssp. kurstaki strain EVB-113-19 ranging from about 0.0001% w/w, 0.0005% w/w, 0.001% w/w, 0.005% w/w, 0.01% w/w, 0.02% w/w, 0.03% w/w, 0.04% w/w, 0.05% w/w, 0.06% w/w, 0.07% w/w, 0.08% w/w, 0.09% w/w, 0.1% w/w, 0.2% w/w, 0.3% w/w, 0.4% w/w, 0.5% w/w, 0.6% w/w, 0.7% w/w, 0.8% w/w, 0.9% w/w, 1% w/w, 2% w/w, 3% w/w, 4% w/w, 5% w/w, 6% w/w, 7% w/w, 8% w/w, 9% w/w, 10% w/w, 11% w/w, 12% w/w, 13% w/w, 14% w/w, 15% w/w, 16% w/w, 17% w/w, 18% w/w, 19% w/w, 20% w/w, 21% w/w, 22% w/w, 23% w/w, 24% w/w, 25% w/w, 26% w/w, 27% w/w, 28% w/w, 29% w/w, 30% w/w, 31% w/w, 32% w/w, 33% w/w, 34% w/w, 35% w/w, 36% w/w, 37% w/w, 38% w/w, 39% w/w, 40% w/w, 41% w/w, 42% w/w, 43% w/w, 44% w/w, 45% w/w, 46% w/w, 47% w/w, 48% w/w, 49% w/w, 50% w/w, 51% w/w, 52% w/w, 53% w/w, 54% w/w, 55% w/w, 56% w/w, 57% w/w, 58% w/w, 59% w/w, 60% w/w, 61% w/w, 62% w/w, 63% w/w, 64% w/w, 65% w/w, 66% w/w, 67% w/w, 68% w/w, 69% w/w, 70% w/w, 71% w/w, 72% w/w, 73% w/w, 74% w/w, 75% w/w, 76% w/w, 77% w/w, 78% w/w, 79% w/w, 80% w/w, 81% w/w, 82% w/w, 83% w/w, 84% w/w, 85% w/w, 86% w/w, 87% w/w, 88% w/w, 89% w/w, 90% w/w, 91% w/w, 92% w/w, 93% w/w, 94% w/w, 95% w/w, 96% w/w, 97% w/w, 98% w/w, 99% w/w, 99.1% w/w, 99.2% w/w, 99.3% w/w, 99.4% w/w, 99.5% w/w, 99.6% w/w, 99.7% w/w, 99.8% w/w, or about 99.9% w/w of the total composition.

[1412] In some embodiments, a combination or composition comprises, consists essentially of, or consists of: a U+2-ACTX-Hv1a toxin having an amino acid sequence according to the amino acid sequence set forth in SEQ ID NO: 61, and one or more fermentation solids, spores, or toxins isolated from a Bacillus thuringiensis ssp. tenebrionis strain NB-176, wherein the combination or composition comprises a concentration of the U+2-ACTX-Hv1a toxin having an amino acid sequence according to the amino acid sequence set forth in SEQ ID NO: 61 ranging from about 0.0001% w/w, 0.0005% w/w, 0.001% w/w, 0.005% w/w, 0.01% w/w, 0.02% w/w, 0.03% w/w, 0.04% w/w, 0.05% w/w, 0.06% w/w, 0.07% w/w, 0.08% w/w, 0.09% w/w, 0.1% w/w, 0.2% w/w, 0.3% w/w, 0.4% w/w, 0.5% w/w, 0.6% w/w, 0.7% w/w, 0.8% w/w, 0.9% w/w, 1% w/w, 2% w/w, 3% w/w, 4% w/w, 5% w/w, 6% w/w, 7% w/w, 8% w/w, 9% w/w, 10% w/w, 11% w/w, 12% w/w, 13% w/w, 14% w/w, 15% w/w, 16% w/w, 17% w/w, 18% w/w, 19% w/w, 20% w/w, 21% w/w, 22% w/w, 23% w/w, 24% w/w, 25% w/w, 26% w/w, 27% w/w, 28% w/w, 29% w/w, 30% w/w, 31% w/w, 32% w/w, 33% w/w, 34% w/w, 35% w/w, 36% w/w, 37% w/w, 38% w/w, 39% w/w, 40% w/w, 41% w/w, 42% w/w, 43% w/w, 44% w/w, 45% w/w, 46% w/w, 47% w/w, 48% w/w, 49% w/w, 50% w/w, 51% w/w, 52% w/w, 53% w/w, 54% w/w, 55% w/w, 56% w/w, 57% w/w, 58% w/w, 59% w/w, 60% w/w, 61% w/w, 62% w/w, 63% w/w, 64% w/w, 65% w/w, 66% w/w, 67% w/w, 68% w/w, 69% w/w, 70% w/w, 71% w/w, 72% w/w, 73% w/w, 74% w/w, 75% w/w, 76% w/w, 77% w/w, 78% w/w, 79% w/w, 80% w/w, 81% w/w, 82% w/w, 83% w/w, 84% w/w, 85% w/w, 86% w/w, 87% w/w, 88% w/w, 89% w/w, 90% w/w, 91% w/w, 92% w/w, 93% w/w, 94% w/w, 95% w/w, 96% w/w, 97% w/w, 98% w/w, 99% w/w, 99.1% w/w, 99.2% w/w, 99.3% w/w, 99.4% w/w, 99.5% w/w, 99.6% w/w, 99.7% w/w, 99.8% w/w, or about 99.9% w/w of the total composition.

[1413] In some embodiments, a combination or composition comprises, consists essentially of, or consists of: a U+2-ACTX-Hv1a toxin having an amino acid sequence according to the amino acid sequence set forth in SEQ ID NO: 61, and one or more fermentation solids, spores, or toxins isolated from a Bacillus thuringiensis ssp. tenebrionis strain NB-176, wherein the combination or composition comprises a concentration of the one or more fermentation solids, spores, or toxins isolated from a Bacillus thuringiensis ssp. tenebrionis strain NB-176 ranging from about 0.0001% w/w, 0.0005% w/w, 0.001% w/w, 0.005% w/w, 0.01% w/w, 0.02% w/w, 0.03% w/w, 0.04% w/w, 0.05% w/w, 0.06% w/w, 0.07% w/w, 0.08% w/w, 0.09% w/w, 0.1% w/w, 0.2% w/w, 0.3% w/w, 0.4% w/w, 0.5% w/w, 0.6% w/w, 0.7% w/w, 0.8% w/w, 0.9% w/w, 1% w/w, 2% w/w, 3% w/w, 4% w/w, 5% w/w, 6% w/w, 7% w/w, 8% w/w, 9% w/w, 10% w/w, 11% w/w, 12% w/w, 13% w/w, 14% w/w, 15% w/w, 16% w/w, 17% w/w, 18% w/w, 19% w/w, 20% w/w, 21% w/w, 22% w/w, 23% w/w, 24% w/w, 25% w/w, 26% w/w, 27% w/w, 28% w/w, 29% w/w, 30% w/w, 31% w/w, 32% w/w, 33% w/w, 34% w/w, 35% w/w, 36% w/w, 37% w/w, 38% w/w, 39% w/w, 40% w/w, 41% w/w, 42% w/w, 43% w/w, 44% w/w, 45% w/w, 46% w/w, 47% w/w, 48% w/w, 49% w/w, 50% w/w, 51% w/w, 52% w/w, 53% w/w, 54% w/w, 55% w/w, 56% w/w, 57% w/w, 58% w/w, 59% w/w, 60% w/w, 61% w/w, 62% w/w, 63% w/w, 64% w/w, 65% w/w, 66% w/w, 67% w/w, 68% w/w, 69% w/w, 70% w/w, 71% w/w, 72% w/w, 73% w/w, 74% w/w, 75% w/w, 76% w/w, 77% w/w, 78% w/w, 79% w/w, 80% w/w, 81% w/w, 82% w/w, 83% w/w, 84% w/w, 85% w/w, 86% w/w, 87% w/w, 88% w/w, 89% w/w, 90% w/w, 91% w/w, 92% w/w, 93% w/w, 94% w/w, 95% w/w, 96% w/w, 97% w/w, 98% w/w, 99% w/w, 99.1% w/w, 99.2% w/w, 99.3% w/w, 99.4% w/w, 99.5% w/w, 99.6% w/w, 99.7% w/w, 99.8% w/w, or about 99.9% w/w of the total composition.

[1414] Combinations: exemplary combinations of other bacteria toxins and U+2-ACTX-Hv1a

[1415] In some embodiments, a combination or composition comprises, consists essentially of, or consists of: a U+2-ACTX-Hv1a toxin having an amino acid sequence according to the amino acid sequence set forth in SEQ ID NO: 61, and a bacterial toxin.

[1416] In some embodiments, a combination or composition comprises, consists essentially of, or consists of: a U+2-ACTX-Hv1a toxin having an amino acid sequence according to the amino acid sequence set forth in SEQ ID NO: 61, and a bacterial toxin, wherein the bacterial toxin is isolated from a bacteria belonging to the Xenorhabdus genus, or Photorhabdus genus.

[1417] In some embodiments, a combination or composition comprises, consists essentially of, or consists of: a U+2-ACTX-Hv1a toxin having an amino acid sequence according to the amino acid sequence set forth in SEQ ID NO: 61, and a Photorhabdus toxin.

[1418] In some embodiments, a combination or composition comprises, consists essentially of, or consists of: a U+2-ACTX-Hv1a toxin having an amino acid sequence according to the amino acid sequence set forth in SEQ ID NO: 61, and a Photorhabdus toxin, wherein the Photorhabdus toxin is selected from the group consisting of: Photorhabdus akhurstii toxin; a Photorhabdus asymbiotica toxin; a Photorhabdus asymbiotica subsp. asymbiotica toxin; a Photorhabdus asymbiotica subsp. asymbiotica ATCC 43949 toxin; a Photorhabdus australis toxin; a Photorhabdus australis DSM 17609 toxin; a Photorhabdus bodei toxin; a Photorhabdus caribbeanensis toxin; a Photorhabdus cinerea toxin; a Photorhabdus hainanensis toxin; a Photorhabdus heterorhabditis toxin; a Photorhabdus kayaii toxin; a Photorhabdus khanii toxin; a Photorhabdus khanii NC19 toxin; a Photorhabdus khanii subsp. guanajuatensis toxin; a Photorhabdus kleinii toxin; a Photorhabdus laumondii toxin; a Photorhabdus laumondii subsp. clarkei toxin; a Photorhabdus laumondii subsp. laumondii toxin; a Photorhabdus laumondii subsp. laumondii TTO1 toxin; a Photorhabdus luminescens toxin; a Photorhabdus luminescens BA1 toxin; a Photorhabdus luminescens NBAII H75HRPL105 toxin; a Photorhabdus luminescens NBAII HiPL101 toxin; a Photorhabdus luminescens subsp. luminescens toxin; a Photorhabdus luminescens subsp. luminescens ATCC 29999 toxin; a Photorhabdus luminescens subsp. mexicana toxin; a Photorhabdus luminescens subsp. sonorensis toxin; a Photorhabdus namnaonensis toxin; a Photorhabdus noenieputensis toxin; a Photorhabdus stackebrandtii toxin; a Photorhabdus tasmaniensis toxin; a Photorhabdus temperata toxin; a Photorhabdus temperata J3 toxin; a Photorhabdus temperata subsp. phorame toxin; a Photorhabdus temperata subsp. temperata toxin; a Photorhabdus temperata subsp. temperata M1021 toxin; a Photorhabdus temperata subsp. temperata Meg1 toxin; a Photorhabdus thracensis toxin; a unclassified Photorhabdus toxin; a Photorhabdus sp. toxin; a Photorhabdus sp. 3014 toxin; a Photorhabdus sp. 3240 toxin; a Photorhabdus sp. Az29 toxin; a Photorhabdus sp. BS21 toxin; a Photorhabdus sp. CbKj163 toxin; a Photorhabdus sp. CRCIA-P01 toxin; a Photorhabdus sp. ENY toxin; a Photorhabdus sp. FL2122 toxin; a Photorhabdus sp. FL480 toxin; a Photorhabdus sp. FsIw96 toxin; a Photorhabdus sp. GDd233 toxin; a Photorhabdus sp. H3086 toxin; a Photorhabdus sp. H3107 toxin; a Photorhabdus sp. H3240 toxin; a Photorhabdus sp. HB301 toxin; a Photorhabdus sp. HB78 toxin; a Photorhabdus sp. HB89 toxin; a Photorhabdus sp. HIT toxin; a Photorhabdus sp. HO1 toxin; a Photorhabdus sp. HUG-39 toxin; a Photorhabdus sp. IT toxin; a Photorhabdus sp. JUN toxin; a Photorhabdus sp. KcTs129 toxin; a Photorhabdus sp. KJ13.1 TH toxin; a Photorhabdus sp. KJ14.3 TH toxin; a Photorhabdus sp. KJ24.5 TH toxin; a Photorhabdus sp. KJ29.1 TH toxin; a Photorhabdus sp. KJ37.1 TH toxin; a Photorhabdus sp. KJ7.1 TH toxin; a Photorhabdus sp. KJ8.2 TH toxin; a Photorhabdus sp. KJ9.1 TH toxin; a Photorhabdus sp. KJ9.2 TH toxin; a Photorhabdus sp. KK1.3 TH toxin; a Photorhabdus sp. KK1.4 TH toxin; a Photorhabdus sp. KMD74 toxin; a Photorhabdus sp. KOH toxin; a Photorhabdus sp. MID10 toxin; a Photorhabdus sp. MOL toxin; a Photorhabdus sp. MSW 058 toxin; a Photorhabdus sp. MSW 079 toxin; a Photorhabdus sp. NK2.1 TH toxin; a Photorhabdus sp. NK2.5 TH toxin; a Photorhabdus sp. NnMt2h toxin; a Photorhabdus sp. NP1 toxin; a Photorhabdus sp. OH10 toxin; a Photorhabdus sp. OnIr40 toxin; a Photorhabdus sp. OnKn2 toxin; a Photorhabdus sp. PB10.1 TH toxin; a Photorhabdus sp. PB16.3 TH toxin; a Photorhabdus sp. PB17.1 TH toxin; a Photorhabdus sp. PB17.3 TH toxin; a Photorhabdus sp. PB2.5 TH toxin; a Photorhabdus sp. PB22.4 TH toxin; a Photorhabdus sp. PB22.5 TH toxin; a Photorhabdus sp. PB32.1 TH toxin; a Photorhabdus sp. PB33.1 TH toxin; a Photorhabdus sp. PB33.4 TH toxin; a Photorhabdus sp. PB37.4 TH toxin; a Photorhabdus sp. PB39.2 TH toxin; a Photorhabdus sp. PB4.5 TH toxin; a Photorhabdus sp. PB41.4 TH toxin; a Photorhabdus sp. PB45.5 TH toxin; a Photorhabdus sp. PB47.1 TH toxin; a Photorhabdus sp. PB47.3 TH toxin; a Photorhabdus sp. PB5.1 TH toxin; a Photorhabdus sp. PB5.4 TH toxin; a Photorhabdus sp. PB50.4 TH toxin; a Photorhabdus sp. PB51.4 TH toxin; a Photorhabdus sp. PB52.2 TH toxin; a Photorhabdus sp. PB54.4 TH toxin; a Photorhabdus sp. PB58.2 TH toxin; a Photorhabdus sp. PB58.4 TH toxin; a Photorhabdus sp. PB58.5 TH toxin; a Photorhabdus sp. PB59.2 TH toxin; a Photorhabdus sp. PB6.5 TH toxin; a Photorhabdus sp. PB67.2 TH toxin; a Photorhabdus sp. PB67.4 TH toxin; a Photorhabdus sp. PB68.1 TH toxin; a Photorhabdus sp. PB7.5 TH toxin; a Photorhabdus sp. PB76.1 TH toxin; a Photorhabdus sp. PB76.4 TH toxin; a Photorhabdus sp. PB76.5 TH toxin; a Photorhabdus sp. PB78.2 TH toxin; a Photorhabdus sp. PB80.3 TH toxin; a Photorhabdus sp. PB80.4 TH toxin; a Photorhabdus sp. Pjun toxin; a Photorhabdus sp. RW14-46 toxin; a Photorhabdus sp. S10-54 toxin; a Photorhabdus sp. S12-55 toxin; a Photorhabdus sp. S14-60 toxin; a Photorhabdus sp. S15-56 toxin; a Photorhabdus sp. S5P8-50 toxin; a Photorhabdus sp. S7-51 toxin; a Photorhabdus sp. S8-52 toxin; a Photorhabdus sp. S9-53 toxin; a Photorhabdus sp. SJ2 toxin; a Photorhabdus sp. SN259 toxin; a Photorhabdus sp. SP1.5 TH toxin; a Photorhabdus sp. SP16.4 TH toxin; a Photorhabdus sp. SP21.5 TH toxin; a Photorhabdus sp. SP3.4 TH toxin; a Photorhabdus sp. SP4.5 TH toxin; a Photorhabdus sp. SP7.3 TH toxin; a Photorhabdus sp. TyKb140 toxin; a Photorhabdus sp. UK76 toxin; a Photorhabdus sp. VMG toxin; a Photorhabdus sp. WA21C toxin; a Photorhabdus sp. WkSs43 toxin; a Photorhabdus sp. Wx13 toxin; a Photorhabdus sp. X₄ toxin; a Photorhabdus sp. YNb90 toxin; and Photorhabdus sp. ZM toxin.

[1419] In some embodiments, a combination or composition comprises, consists essentially of, or consists of: a U+2-ACTX-Hv1a toxin having an amino acid sequence according to the amino acid sequence set forth in SEQ ID NO: 61, and a Photorhabdus luminescens toxin.

[1420] In some embodiments, a combination or composition comprises, consists essentially of, or consists of: a U+2-ACTX-Hv1a toxin having an amino acid sequence according to the amino acid sequence set forth in SEQ ID NO: 61, and a Photorhabdus luminescens toxin, wherein the Photorhabdus luminescens toxin comprises a Photorhabdus luminescens “toxin complex a” (Tca).

[1421] In some embodiments, a combination or composition comprises, consists essentially of, or consists of: a U+2-ACTX-Hv1a toxin having an amino acid sequence according to the amino acid sequence set forth in SEQ ID NO: 61, and a Photorhabdus luminescens toxin, wherein the Photorhabdus luminescens toxin comprises a Photorhabdus luminescens “toxin complex c” (Tcc).

[1422] In some embodiments, a combination or composition comprises, consists essentially of, or consists of: a U+2-ACTX-Hv1a toxin having an amino acid sequence according to the amino acid sequence set forth in SEQ ID NO: 61, and a Photorhabdus luminescens toxin, wherein the Photorhabdus luminescens toxin comprises a Photorhabdus luminescens “toxin complex d” (Tcd).

[1423] In some embodiments, a combination or composition comprises, consists essentially of, or consists of: a U+2-ACTX-Hv1a toxin having an amino acid sequence according to the amino acid sequence set forth in SEQ ID NO: 61, and a Photorhabdus luminescens toxin comprising a TcaA protein (SEQ ID NO: 616), a TcaB protein (SEQ ID NO: 617), a TcaC protein (SEQ ID NO: 618), and a TcaZ protein (SEQ ID NO: 619), or an extract thereof.

[1424] In some embodiments, a combination or composition comprises, consists essentially of, or consists of: a U+2-ACTX-Hv1a toxin having an amino acid sequence according to the amino acid sequence set forth in SEQ ID NO: 61, and one or more organisms belonging to the Yersinia genus.

[1425] In some embodiments, a combination or composition comprises, consists essentially of, or consists of: a U+2-ACTX-Hv1a toxin having an amino acid sequence according to the amino acid sequence set forth in SEQ ID NO: 61, and one or more peptides isolated from an organism belonging to a Yersinia genus.

[1426] In some embodiments, a combination or composition comprises, consists essentially of, or consists of: a U+2-ACTX-Hv1a toxin having an amino acid sequence according to the amino acid sequence set forth in SEQ ID NO: 61, and one or more of the following species: Yersinia aldovaeyb, Yersinia aleksiciae, Yersinia bercovieri, Yersinia canariae, Yersinia enterocolitica, Yersinia enterocolitica subsp. enterocolitica, Yersinia enterocolitica subsp. palearctica, Yersinia entomophaga, Yersinia frederiksenii, Yersinia hibernica, Yersinia intermedia, Yersinia kristensenii, Yersinia kristensenii subsp. kristensenii, Yersinia kristensenii subsp. rochesterensis, Yersinia massiliensis, Yersinia mollaretii, Yersinia nurmii, Yersinia pekkanenii, Yersinia pestis, Yersinia pestis subsp. pestis, Yersinia pestis subsp. medievalis, Yersinia pestis subsp. orientalis, Yersinia pseudotuberculosis, Yersinia pseudotuberculosis subsp. pestis, Yersinia pseudotuberculosis subsp. pseudotuberculosis, Yersinia rohdei, Yersinia ruckeri, Yersinia similis, or Yersinia wautersii.

[1427] In some embodiments, a combination or composition comprises, consists essentially of, or consists of: a U+2-ACTX-Hv1a toxin having an amino acid sequence according to the amino acid sequence set forth in SEQ ID NO: 61, and one or more peptides isolated from one or more of the following species: Yersinia aldovaeyb, Yersinia aleksiciae, Yersinia bercovieri, Yersinia canariae, Yersinia enterocolitica, Yersinia enterocolitica subsp. enterocolitica, Yersinia enterocolitica subsp. palearctica, Yersinia entomophaga, Yersinia frederiksenii, Yersinia hibernica, Yersinia intermedia, Yersinia kristensenii, Yersinia kristensenii subsp. kristensenii, Yersinia kristensenii subsp. rochesterensis, Yersinia massiliensis, Yersinia mollaretii, Yersinia nurmii, Yersinia pekkanenii, Yersinia pestis, Yersinia pestis subsp. pestis, Yersinia pestis subsp. medievalis, Yersinia pestis subsp. orientalis, Yersinia pseudotuberculosis, Yersinia pseudotuberculosis subsp. pestis, Yersinia pseudotuberculosis subsp. pseudotuberculosis, Yersinia rohdei, Yersinia ruckeri, Yersinia similis, or Yersinia wautersii.

[1428] In some embodiments, a combination or composition comprises, consists essentially of, or consists of: a U+2-ACTX-Hv1a toxin having an amino acid sequence according to the amino acid sequence set forth in SEQ ID NO: 61, and a Yersinia entomophaga or a Yersinia nurmii.

[1429] In some embodiments, a combination or composition comprises, consists essentially of, or consists of: a U+2-ACTX-Hv1a toxin having an amino acid sequence according to the amino acid sequence set forth in SEQ ID NO: 61, and one or more peptides isolated from Yersinia entomophaga or Yersinia nurmii.

[1430] In some embodiments, a combination or composition comprises, consists essentially of, or consists of: a U+2-ACTX-Hv1a toxin having an amino acid sequence according to the amino acid sequence set forth in SEQ ID NO: 61, and a Yersinia entomophaga bacteria, and/or a toxin therefrom.

[1431] In some embodiments, a combination or composition comprises, consists essentially of, or consists of: a U+2-ACTX-Hv1a toxin having an amino acid sequence according to the amino acid sequence set forth in SEQ ID NO: 61, and one or more Yersinia nurmii bacteria, and/or a toxin therefrom.

[1432] In some embodiments, a combination or composition comprises, consists essentially of, or consists of: a U+2-ACTX-Hv1a toxin having an amino acid sequence according to the amino acid sequence set forth in SEQ ID NO: 61, and a Photorhabdus luminescens toxin complex comprising a TcaA protein (SEQ ID NO: 616), a TcaB protein (SEQ ID NO: 617), a TcaC protein (SEQ ID NO: 618), and a TcaZ protein (SEQ ID NO: 619), or an extract thereof, wherein the combination or composition comprises a concentration of the U+2-ACTX-Hv1a toxin having an amino acid sequence according to the amino acid sequence set forth in SEQ ID NO: 61 ranging from about 0.0001% w/w, 0.0005% w/w, 0.001% w/w, 0.005% w/w, 0.01% w/w, 0.02% w/w, 0.03% w/w, 0.04% w/w, 0.05% w/w, 0.06% w/w, 0.07% w/w, 0.08% w/w, 0.09% w/w, 0.1% w/w, 0.2% w/w, 0.3% w/w, 0.4% w/w, 0.5% w/w, 0.6% w/w, 0.7% w/w, 0.8% w/w, 0.9% w/w, 1% w/w, 2% w/w, 3% w/w, 4% w/w, 5% w/w, 6% w/w, 7% w/w, 8% w/w, 9% w/w, 10% w/w, 11% w/w, 12% w/w, 13% w/w, 14% w/w, 15% w/w, 16% w/w, 17% w/w, 18% w/w, 19% w/w, 20% w/w, 21% w/w, 22% w/w, 23% w/w, 24% w/w, 25% w/w, 26% w/w, 27% w/w, 28% w/w, 29% w/w, 30% w/w, 31% w/w, 32% w/w, 33% w/w, 34% w/w, 35% w/w, 36% w/w, 37% w/w, 38% w/w, 39% w/w, 40% w/w, 41% w/w, 42% w/w, 43% w/w, 44% w/w, 45% w/w, 46% w/w, 47% w/w, 48% w/w, 49% w/w, 50% w/w, 51% w/w, 52% w/w, 53% w/w, 54% w/w, 55% w/w, 56% w/w, 57% w/w, 58% w/w, 59% w/w, 60% w/w, 61% w/w, 62% w/w, 63% w/w, 64% w/w, 65% w/w, 66% w/w, 67% w/w, 68% w/w, 69% w/w, 70% w/w, 71% w/w, 72% w/w, 73% w/w, 74% w/w, 75% w/w, 76% w/w, 77% w/w, 78% w/w, 79% w/w, 80% w/w, 81% w/w, 82% w/w, 83% w/w, 84% w/w, 85% w/w, 86% w/w, 87% w/w, 88% w/w, 89% w/w, 90% w/w, 91% w/w, 92% w/w, 93% w/w, 94% w/w, 95% w/w, 96% w/w, 97% w/w, 98% w/w, 99% w/w, 99.1% w/w, 99.2% w/w, 99.3% w/w, 99.4% w/w, 99.5% w/w, 99.6% w/w, 99.7% w/w, 99.8% w/w, or about 99.9% w/w of the total composition.

[1433] In some embodiments, a combination or composition comprises, consists essentially of, or consists of: a U+2-ACTX-Hv1a toxin having an amino acid sequence according to the amino acid sequence set forth in SEQ ID NO: 61, and a Photorhabdus luminescens toxin complex comprising a TcaA protein (SEQ ID NO: 616), a TcaB protein (SEQ ID NO: 617), a TcaC protein (SEQ ID NO: 618), and a TcaZ protein (SEQ ID NO: 619), or an extract thereof, wherein the combination or composition comprises a concentration of the Photorhabdus luminescens toxin complex ranging from about 0.0001% w/w, 0.0005% w/w, 0.001% w/w, 0.005% w/w, 0.01% w/w, 0.02% w/w, 0.03% w/w, 0.04% w/w, 0.05% w/w, 0.06% w/w, 0.07% w/w, 0.08% w/w, 0.09% w/w, 0.1% w/w, 0.2% w/w, 0.3% w/w, 0.4% w/w, 0.5% w/w, 0.6% w/w, 0.7% w/w, 0.8% w/w, 0.9% w/w, 1% w/w, 2% w/w, 3% w/w, 4% w/w, 5% w/w, 6% w/w, 7% w/w, 8% w/w, 9% w/w, 10% w/w, 11% w/w, 12% w/w, 13% w/w, 14% w/w, 15% w/w, 16% w/w, 17% w/w, 18% w/w, 19% w/w, 20% w/w, 21% w/w, 22% w/w, 23% w/w, 24% w/w, 25% w/w, 26% w/w, 27% w/w, 28% w/w, 29% w/w, 30% w/w, 31% w/w, 32% w/w, 33% w/w, 34% w/w, 35% w/w, 36% w/w, 37% w/w, 38% w/w, 39% w/w, 40% w/w, 41% w/w, 42% w/w, 43% w/w, 44% w/w, 45% w/w, 46% w/w, 47% w/w, 48% w/w, 49% w/w, 50% w/w, 51% w/w, 52% w/w, 53% w/w, 54% w/w, 55% w/w, 56% w/w, 57% w/w, 58% w/w, 59% w/w, 60% w/w, 61% w/w, 62% w/w, 63% w/w, 64% w/w, 65% w/w, 66% w/w, 67% w/w, 68% w/w, 69% w/w, 70% w/w, 71% w/w, 72% w/w, 73% w/w, 74% w/w, 75% w/w, 76% w/w, 77% w/w, 78% w/w, 79% w/w, 80% w/w, 81% w/w, 82% w/w, 83% w/w, 84% w/w, 85% w/w, 86% w/w, 87% w/w, 88% w/w, 89% w/w, 90% w/w, 91% w/w, 92% w/w, 93% w/w, 94% w/w, 95% w/w, 96% w/w, 97% w/w, 98% w/w, 99% w/w, 99.1% w/w, 99.2% w/w, 99.3% w/w, 99.4% w/w, 99.5% w/w, 99.6% w/w, 99.7% w/w, 99.8% w/w, or about 99.9% w/w of the total composition.

[1434] Combinations: Exemplary Combinations of GNA and U+2-ACTX-Hv1a

[1435] In some embodiments, a combination or composition comprises, consists essentially of, or consists of: a U+2-ACTX-Hv1a toxin having an amino acid sequence according to the amino acid sequence set forth in SEQ ID NO: 61, and a lectin.

[1436] In some embodiments, a combination or composition comprises, consists essentially of, or consists of: a U+2-ACTX-Hv1a toxin having an amino acid sequence according to the amino acid sequence set forth in SEQ ID NO: 61, and a lectin, wherein the lectin is one or more of the following: Galanthus nivalis agglutinin (GNA); Sambucus nigra lectin (SNA); Maackia amurensis-II (MAL-II); Erythrina cristagalli lectin (ECL); Ricinus communis agglutinin-I (RCA); peanut agglutinin (PNA); wheat germ agglutinin (WGA); Griffonia simplicifolia-II (GSL-II); Con A; Lens culinaris agglutinin (LCA); Mannose-binding lectin (MBL); BanLec; galectins; Phaseolus vulgaris Leucoagglutinin (PHA-L); Phaseolus vulgaris Erythroagglutinin (PHA-E); and/or Datura stramonium Lectin (DSL).

[1437] In some embodiments, a combination or composition comprises, consists essentially of, or consists of: a U+2-ACTX-Hv1a toxin having an amino acid sequence according to the amino acid sequence set forth in SEQ ID NO: 61, and a lectin, wherein the lectin is Galanthus nivalis agglutinin (GNA).

[1438] In some embodiments, a combination or composition comprises, consists essentially of, or consists of: a U+2-ACTX-Hv1a toxin having an amino acid sequence according to the amino acid sequence set forth in SEQ ID NO: 61, and a lectin, wherein the lectin has an amino acid sequence that is at least 50% identical, at least 55% identical, at least 60% identical, at least 65% identical, at least 70% identical, at least 75% identical, at least 80% identical, at least 81% identical, at least 82% identical, at least 83% identical, at least 84% identical, at least 85% identical, at least 86% identical, at least 87% identical, at least 88% identical, at least 89% identical, at least 90% identical, at least 91% identical, at least 92% identical, at least 93% identical, at least 94% identical, at least 95% identical, at least 96% identical, at least 97% identical, at least 98% identical, at least 99% identical, at least 99.5% identical, at least 99.6% identical, at least 99.7% identical, at least 99.8% identical, at least 99.9% identical, or 100% identical to an amino acid sequence set forth in any one of SEQ ID NOs: 35, 595-615.

[1439] In some embodiments, a combination or composition comprises, consists essentially of, or consists of: a U+2-ACTX-Hv1a toxin having an amino acid sequence according to the amino acid sequence set forth in SEQ ID NO: 61, and a lectin, wherein the lectin has an amino acid sequence that is at least 50% identical, at least 55% identical, at least 60% identical, at least 65% identical, at least 70% identical, at least 75% identical, at least 80% identical, at least 81% identical, at least 82% identical, at least 83% identical, at least 84% identical, at least 85% identical, at least 86% identical, at least 87% identical, at least 88% identical, at least 89% identical, at least 90% identical, at least 91% identical, at least 92% identical, at least 93% identical, at least 94% identical, at least 95% identical, at least 96% identical, at least 97% identical, at least 98% identical, at least 99% identical, at least 99.5% identical, at least 99.6% identical, at least 99.7% identical, at least 99.8% identical, at least 99.9% identical, or 100% identical to an amino acid sequence:

(SEQ ID NO: 35)
″MAKASLLILATIFLGVITPSCLSENILYSGETLPTGGFLSSGSFVFIM
QEDCNLVLYNVDKPIWATNTGGLSSDCSLSMQNDGNLVVFTPSNKPIWA
SNTDGQNGNYVCILQKDRNVVIYGTNRWATGTYTGAVGIPESPPSEKYP
SAGKIKLVTAK”.

[1440] In some embodiments, a combination or composition comprises, consists essentially of, or consists of: a U+2-ACTX-Hv1a toxin having an amino acid sequence according to the amino acid sequence set forth in SEQ ID NO: 61, and a lectin, wherein the lectin has an amino acid sequence that is at least 50% identical, at least 55% identical, at least 60% identical, at least 65% identical, at least 70% identical, at least 75% identical, at least 80% identical, at least 81% identical, at least 82% identical, at least 83% identical, at least 84% identical, at least 85% identical, at least 86% identical, at least 87% identical, at least 88% identical, at least 89% identical, at least 90% identical, at least 91% identical, at least 92% identical, at least 93% identical, at least 94% identical, at least 95% identical, at least 96% identical, at least 97% identical, at least 98% identical, at least 99% identical, at least 99.5% identical, at least 99.6% identical, at least 99.7% identical, at least 99.8% identical, at least 99.9% identical, or 100% identical to an amino acid sequence:

(SEQ ID NO: 595)
“MAKASLLILAAIFLGVITPSCLSDNILYSGETLSTGEFLNYGSFVFIM
QEDCNLVLYDVDKPIWATNTGGLSRSCFLSMQTDGNLVVYNPSNKPIWA
SNTGGQNGNYVCILQKDRNVVIYGTDRWATGTHTGLVGIPASPPSEKYP
TAGKIKLVTAK”.

[1441] In some embodiments, a combination or composition comprises, consists essentially of, or consists of: a U+2-ACTX-Hv1a toxin having an amino acid sequence according to the amino acid sequence set forth in SEQ ID NO: 61, and a GNA having an amino acid sequence according to the amino acid sequence set forth in SEQ ID NO: 35, wherein the combination or composition comprises a concentration of the U+2-ACTX-Hv1a toxin having an amino acid sequence according to the amino acid sequence set forth in SEQ ID NO: 61 ranging from about 0.0001% w/w, 0.0005% w/w, 0.001% w/w, 0.005% w/w, 0.01% w/w, 0.02% w/w, 0.03% w/w, 0.04% w/w, 0.05% w/w, 0.06% w/w, 0.07% w/w, 0.08% w/w, 0.09% w/w, 0.1% w/w, 0.2% w/w, 0.3% w/w, 0.4% w/w, 0.5% w/w, 0.6% w/w, 0.7% w/w, 0.8% w/w, 0.9% w/w, 1% w/w, 2% w/w, 3% w/w, 4% w/w, 5% w/w, 6% w/w, 7% w/w, 8% w/w, 9% w/w, 10% w/w, 11% w/w, 12% w/w, 13% w/w, 14% w/w, 15% w/w, 16% w/w, 17% w/w, 18% w/w, 19% w/w, 20% w/w, 21% w/w, 22% w/w, 23% w/w, 24% w/w, 25% w/w, 26% w/w, 27% w/w, 28% w/w, 29% w/w, 30% w/w, 31% w/w, 32% w/w, 33% w/w, 34% w/w, 35% w/w, 36% w/w, 37% w/w, 38% w/w, 39% w/w, 40% w/w, 41% w/w, 42% w/w, 43% w/w, 44% w/w, 45% w/w, 46% w/w, 47% w/w, 48% w/w, 49% w/w, 50% w/w, 51% w/w, 52% w/w, 53% w/w, 54% w/w, 55% w/w, 56% w/w, 57% w/w, 58% w/w, 59% w/w, 60% w/w, 61% w/w, 62% w/w, 63% w/w, 64% w/w, 65% w/w, 66% w/w, 67% w/w, 68% w/w, 69% w/w, 70% w/w, 71% w/w, 72% w/w, 73% w/w, 74% w/w, 75% w/w, 76% w/w, 77% w/w, 78% w/w, 79% w/w, 80% w/w, 81% w/w, 82% w/w, 83% w/w, 84% w/w, 85% w/w, 86% w/w, 87% w/w, 88% w/w, 89% w/w, 90% w/w, 91% w/w, 92% w/w, 93% w/w, 94% w/w, 95% w/w, 96% w/w, 97% w/w, 98% w/w, 99% w/w, 99.1% w/w, 99.2% w/w, 99.3% w/w, 99.4% w/w, 99.5% w/w, 99.6% w/w, 99.7% w/w, 99.8% w/w, or about 99.9% w/w of the total composition.

[1442] In some embodiments, a combination or composition comprises, consists essentially of, or consists of: a U+2-ACTX-Hv1a toxin having an amino acid sequence according to the amino acid sequence set forth in SEQ ID NO: 61, and a GNA having an amino acid sequence according to the amino acid sequence set forth in SEQ ID NO: 595, wherein the combination or composition comprises a concentration of the U+2-ACTX-Hv1a toxin having an amino acid sequence according to the amino acid sequence set forth in SEQ ID NO: 61 ranging from about 0.0001% w/w, 0.0005% w/w, 0.001% w/w, 0.005% w/w, 0.01% w/w, 0.02% w/w, 0.03% w/w, 0.04% w/w, 0.05% w/w, 0.06% w/w, 0.07% w/w, 0.08% w/w, 0.09% w/w, 0.1% w/w, 0.2% w/w, 0.3% w/w, 0.4% w/w, 0.5% w/w, 0.6% w/w, 0.7% w/w, 0.8% w/w, 0.9% w/w, 1% w/w, 2% w/w, 3% w/w, 4% w/w, 5% w/w, 6% w/w, 7% w/w, 8% w/w, 9% w/w, 10% w/w, 11% w/w, 12% w/w, 13% w/w, 14% w/w, 15% w/w, 16% w/w, 17% w/w, 18% w/w, 19% w/w, 20% w/w, 21% w/w, 22% w/w, 23% w/w, 24% w/w, 25% w/w, 26% w/w, 27% w/w, 28% w/w, 29% w/w, 30% w/w, 31% w/w, 32% w/w, 33% w/w, 34% w/w, 35% w/w, 36% w/w, 37% w/w, 38% w/w, 39% w/w, 40% w/w, 41% w/w, 42% w/w, 43% w/w, 44% w/w, 45% w/w, 46% w/w, 47% w/w, 48% w/w, 49% w/w, 50% w/w, 51% w/w, 52% w/w, 53% w/w, 54% w/w, 55% w/w, 56% w/w, 57% w/w, 58% w/w, 59% w/w, 60% w/w, 61% w/w, 62% w/w, 63% w/w, 64% w/w, 65% w/w, 66% w/w, 67% w/w, 68% w/w, 69% w/w, 70% w/w, 71% w/w, 72% w/w, 73% w/w, 74% w/w, 75% w/w, 76% w/w, 77% w/w, 78% w/w, 79% w/w, 80% w/w, 81% w/w, 82% w/w, 83% w/w, 84% w/w, 85% w/w, 86% w/w, 87% w/w, 88% w/w, 89% w/w, 90% w/w, 91% w/w, 92% w/w, 93% w/w, 94% w/w, 95% w/w, 96% w/w, 97% w/w, 98% w/w, 99% w/w, 99.1% w/w, 99.2% w/w, 99.3% w/w, 99.4% w/w, 99.5% w/w, 99.6% w/w, 99.7% w/w, 99.8% w/w, or about 99.9% w/w of the total composition.

[1443] In some embodiments, a combination or composition comprises, consists essentially of, or consists of: a U+2-ACTX-Hv1a toxin having an amino acid sequence according to the amino acid sequence set forth in SEQ ID NO: 61, and a GNA having an amino acid sequence according to the amino acid sequence set forth in SEQ ID NO: 35, wherein the combination or composition comprises a concentration of the a GNA having an amino acid sequence according to the amino acid sequence set forth in SEQ ID NO: 35 ranging from about 0.0001% w/w, 0.0005% w/w, 0.001% w/w, 0.005% w/w, 0.01% w/w, 0.02% w/w, 0.03% w/w, 0.04% w/w, 0.05% w/w, 0.06% w/w, 0.07% w/w, 0.08% w/w, 0.09% w/w, 0.1% w/w, 0.2% w/w, 0.3% w/w, 0.4% w/w, 0.5% w/w, 0.6% w/w, 0.7% w/w, 0.8% w/w, 0.9% w/w, 1% w/w, 2% w/w, 3% w/w, 4% w/w, 5% w/w, 6% w/w, 7% w/w, 8% w/w, 9% w/w, 10% w/w, 11% w/w, 12% w/w, 13% w/w, 14% w/w, 15% w/w, 16% w/w, 17% w/w, 18% w/w, 19% w/w, 20% w/w, 21% w/w, 22% w/w, 23% w/w, 24% w/w, 25% w/w, 26% w/w, 27% w/w, 28% w/w, 29% w/w, 30% w/w, 31% w/w, 32% w/w, 33% w/w, 34% w/w, 35% w/w, 36% w/w, 37% w/w, 38% w/w, 39% w/w, 40% w/w, 41% w/w, 42% w/w, 43% w/w, 44% w/w, 45% w/w, 46% w/w, 47% w/w, 48% w/w, 49% w/w, 50% w/w, 51% w/w, 52% w/w, 53% w/w, 54% w/w, 55% w/w, 56% w/w, 57% w/w, 58% w/w, 59% w/w, 60% w/w, 61% w/w, 62% w/w, 63% w/w, 64% w/w, 65% w/w, 66% w/w, 67% w/w, 68% w/w, 69% w/w, 70% w/w, 71% w/w, 72% w/w, 73% w/w, 74% w/w, 75% w/w, 76% w/w, 77% w/w, 78% w/w, 79% w/w, 80% w/w, 81% w/w, 82% w/w, 83% w/w, 84% w/w, 85% w/w, 86% w/w, 87% w/w, 88% w/w, 89% w/w, 90% w/w, 91% w/w, 92% w/w, 93% w/w, 94% w/w, 95% w/w, 96% w/w, 97% w/w, 98% w/w, 99% w/w, 99.1% w/w, 99.2% w/w, 99.3% w/w, 99.4% w/w, 99.5% w/w, 99.6% w/w, 99.7% w/w, 99.8% w/w, or about 99.9% w/w of the total composition.

[1444] In some embodiments, a combination or composition comprises, consists essentially of, or consists of: a U+2-ACTX-Hv1a toxin having an amino acid sequence according to the amino acid sequence set forth in SEQ ID NO: 61, and a GNA having an amino acid sequence according to the amino acid sequence set forth in SEQ ID NO: 595, wherein the combination or composition comprises a concentration of the a GNA having an amino acid sequence according to the amino acid sequence set forth in SEQ ID NO: 595 ranging from about 0.0001% w/w, 0.0005% w/w, 0.001% w/w, 0.005% w/w, 0.01% w/w, 0.02% w/w, 0.03% w/w, 0.04% w/w, 0.05% w/w, 0.06% w/w, 0.07% w/w, 0.08% w/w, 0.09% w/w, 0.1% w/w, 0.2% w/w, 0.3% w/w, 0.4% w/w, 0.5% w/w, 0.6% w/w, 0.7% w/w, 0.8% w/w, 0.9% w/w, 1% w/w, 2% w/w, 3% w/w, 4% w/w, 5% w/w, 6% w/w, 7% w/w, 8% w/w, 9% w/w, 10% w/w, 11% w/w, 12% w/w, 13% w/w, 14% w/w, 15% w/w, 16% w/w, 17% w/w, 18% w/w, 19% w/w, 20% w/w, 21% w/w, 22% w/w, 23% w/w, 24% w/w, 25% w/w, 26% w/w, 27% w/w, 28% w/w, 29% w/w, 30% w/w, 31% w/w, 32% w/w, 33% w/w, 34% w/w, 35% w/w, 36% w/w, 37% w/w, 38% w/w, 39% w/w, 40% w/w, 41% w/w, 42% w/w, 43% w/w, 44% w/w, 45% w/w, 46% w/w, 47% w/w, 48% w/w, 49% w/w, 50% w/w, 51% w/w, 52% w/w, 53% w/w, 54% w/w, 55% w/w, 56% w/w, 57% w/w, 58% w/w, 59% w/w, 60% w/w, 61% w/w, 62% w/w, 63% w/w, 64% w/w, 65% w/w, 66% w/w, 67% w/w, 68% w/w, 69% w/w, 70% w/w, 71% w/w, 72% w/w, 73% w/w, 74% w/w, 75% w/w, 76% w/w, 77% w/w, 78% w/w, 79% w/w, 80% w/w, 81% w/w, 82% w/w, 83% w/w, 84% w/w, 85% w/w, 86% w/w, 87% w/w, 88% w/w, 89% w/w, 90% w/w, 91% w/w, 92% w/w, 93% w/w, 94% w/w, 95% w/w, 96% w/w, 97% w/w, 98% w/w, 99% w/w, 99.1% w/w, 99.2% w/w, 99.3% w/w, 99.4% w/w, 99.5% w/w, 99.6% w/w, 99.7% w/w, 99.8% w/w, or about 99.9% w/w of the total composition.

[1445] Combinations: Exemplary Combinations of Azadirachtin and U+2-ACTX-Hv1a

[1446] In some embodiments, a combination or composition comprises, consists essentially of, or consists of: a U+2-ACTX-Hv1a toxin having an amino acid sequence according to the amino acid sequence set forth in SEQ ID NO: 61, and a compound isolated from an Azadirachta indica (also known as neem, nimtree or Indian lilac).

[1447] In some embodiments, a combination or composition comprises, consists essentially of, or consists of: a U+2-ACTX-Hv1a toxin having an amino acid sequence according to the amino acid sequence set forth in SEQ ID NO: 61, and an Azadirachta indica compound.

[1448] In some embodiments, a combination or composition comprises, consists essentially of, or consists of: a U+2-ACTX-Hv1a toxin having an amino acid sequence according to the amino acid sequence set forth in SEQ ID NO: 61, and one or more of the following: an Azadirachtin; an Azadiradione; an Azadiradionolide; a Deacetylgedunin; a Deacetylazadirachtinol; a Desfuranoazadiradione; a Epoxyazadiradione; a Gedunin; a Mahmoodin; a Neemfruitin A; a Neemfruitin B; a Nimbolide; a Nimbin; a Nimolicinol; an Ohchinin Acetate; a Salannin; a Salannol; an alpha-Nimolactone; a beta-Nimolactone; a 2′,3′-Dihydrosalannin; a 3-Deacetylsalannin; a 6-Deacetylnimbin; a 7-Acetyl-16,17-dehydro-16-hydroxyneotrichilenone; a 7-Benzoylnimbocinol; a 7-Deacetyl-7-benzoylepoxyazadiradione; a 7-Deacetyl-7-benzoylgedunin; a 7-Deacetyl-17-epinimolicinol; a 15-Hydroxyazadiradione; a 17-Epi-17-Hydroxyazadiradione; a 17-Epiazadiradione; a 20,21,22,23-Tetrahydro-23-oxoazadirone; a 22,23-Dihydronimocinol; or a 28-Deoxonimbolide.

[1449] In some embodiments, a combination or composition comprises, consists essentially of, or consists of: a U+2-ACTX-Hv1a toxin having an amino acid sequence according to the amino acid sequence set forth in SEQ ID NO: 61, and Azadirachtin.

[1450] In some embodiments, a combination or composition comprises, consists essentially of, or consists of: a U+2-ACTX-Hv1a toxin having an amino acid sequence according to the amino acid sequence set forth in SEQ ID NO: 61, and Azadirachtin, wherein the Azadirachtin has a chemical formula: C₃₅H₄₄O₁₆.

[1451] In some embodiments, a combination or composition comprises, consists essentially of, or consists of: a U+2-ACTX-Hv1a toxin having an amino acid sequence according to the amino acid sequence set forth in SEQ ID NO: 61, and an Azadirachtin, wherein the Azadirachtin has a chemical formula: C₃₅H₄₄O₁₆, wherein the combination or composition comprises a concentration of the Azadirachtin, wherein the Azadirachtin has a chemical formula: C₃₅H₄₄O₁₆ ranging from about 0.0001% w/w, 0.0005% w/w, 0.001% w/w, 0.005% w/w, 0.01% w/w, 0.02% w/w, 0.03% w/w, 0.04% w/w, 0.05% w/w, 0.06% w/w, 0.07% w/w, 0.08% w/w, 0.09% w/w, 0.1% w/w, 0.2% w/w, 0.3% w/w, 0.4% w/w, 0.5% w/w, 0.6% w/w, 0.7% w/w, 0.8% w/w, 0.9% w/w, 1% w/w, 2% w/w, 3% w/w, 4% w/w, 5% w/w, 6% w/w, 7% w/w, 8% w/w, 9% w/w, 10% w/w, 11% w/w, 12% w/w, 13% w/w, 14% w/w, 15% w/w, 16% w/w, 17% w/w, 18% w/w, 19% w/w, 20% w/w, 21% w/w, 22% w/w, 23% w/w, 24% w/w, 25% w/w, 26% w/w, 27% w/w, 28% w/w, 29% w/w, 30% w/w, 31% w/w, 32% w/w, 33% w/w, 34% w/w, 35% w/w, 36% w/w, 37% w/w, 38% w/w, 39% w/w, 40% w/w, 41% w/w, 42% w/w, 43% w/w, 44% w/w, 45% w/w, 46% w/w, 47% w/w, 48% w/w, 49% w/w, 50% w/w, 51% w/w, 52% w/w, 53% w/w, 54% w/w, 55% w/w, 56% w/w, 57% w/w, 58% w/w, 59% w/w, 60% w/w, 61% w/w, 62% w/w, 63% w/w, 64% w/w, 65% w/w, 66% w/w, 67% w/w, 68% w/w, 69% w/w, 70% w/w, 71% w/w, 72% w/w, 73% w/w, 74% w/w, 75% w/w, 76% w/w, 77% w/w, 78% w/w, 79% w/w, 80% w/w, 81% w/w, 82% w/w, 83% w/w, 84% w/w, 85% w/w, 86% w/w, 87% w/w, 88% w/w, 89% w/w, 90% w/w, 91% w/w, 92% w/w, 93% w/w, 94% w/w, 95% w/w, 96% w/w, 97% w/w, 98% w/w, 99% w/w, 99.1% w/w, 99.2% w/w, 99.3% w/w, 99.4% w/w, 99.5% w/w, 99.6% w/w, 99.7% w/w, 99.8% w/w, or about 99.9% w/w of the total composition.

[1452] In some embodiments, a combination or composition comprises, consists essentially of, or consists of: a U+2-ACTX-Hv1a toxin having an amino acid sequence according to the amino acid sequence set forth in SEQ ID NO: 61, and an Azadirachtin, wherein the Azadirachtin has a chemical formula: C₃₅H₄₄O₁₆, wherein the combination or composition comprises a concentration of the U+2-ACTX-Hy1a toxin having an amino acid sequence according to the amino acid sequence set forth in SEQ ID NO: 61 ranging from about 0.0001% w/w, 0.0005% w/w, 0.001% w/w, 0.005% w/w, 0.01% w/w, 0.02% w/w, 0.03% w/w, 0.04% w/w, 0.05% w/w, 0.06% w/w, 0.07% w/w, 0.08% w/w, 0.09% w/w, 0.1% w/w, 0.2% w/w, 0.3% w/w, 0.4% w/w, 0.5% w/w, 0.6% w/w, 0.7% w/w, 0.8% w/w, 0.9% w/w, 1% w/w, 2% w/w, 3% w/w, 4% w/w, 5% w/w, 6% w/w, 7% w/w, 8% w/w, 9% w/w, 10% w/w, 11% w/w, 12% w/w, 13% w/w, 14% w/w, 15% w/w, 16% w/w, 17% w/w, 18% w/w, 19% w/w, 20% w/w, 21% w/w, 22% w/w, 23% w/w, 24% w/w, 25% w/w, 26% w/w, 27% w/w, 28% w/w, 29% w/w, 30% w/w, 31% w/w, 32% w/w, 33% w/w, 34% w/w, 35% w/w, 36% w/w, 37% w/w, 38% w/w, 39% w/w, 40% w/w, 41% w/w, 42% w/w, 43% w/w, 44% w/w, 45% w/w, 46% w/w, 47% w/w, 48% w/w, 49% w/w, 50% w/w, 51% w/w, 52% w/w, 53% w/w, 54% w/w, 55% w/w, 56% w/w, 57% w/w, 58% w/w, 59% w/w, 60% w/w, 61% w/w, 62% w/w, 63% w/w, 64% w/w, 65% w/w, 66% w/w, 67% w/w, 68% w/w, 69% w/w, 70% w/w, 71% w/w, 72% w/w, 73% w/w, 74% w/w, 75% w/w, 76% w/w, 77% w/w, 78% w/w, 79% w/w, 80% w/w, 81% w/w, 82% w/w, 83% w/w, 84% w/w, 85% w/w, 86% w/w, 87% w/w, 88% w/w, 89% w/w, 90% w/w, 91% w/w, 92% w/w, 93% w/w, 94% w/w, 95% w/w, 96% w/w, 97% w/w, 98% w/w, 99% w/w, 99.1% w/w, 99.2% w/w, 99.3% w/w, 99.4% w/w, 99.5% w/w, 99.6% w/w, 99.7% w/w, 99.8% w/w, or about 99.9% w/w of the total composition.

[1453] Combinations: Exemplary Combinations of Boric Acid and U+2-ACTX-Hv1a

[1454] In some embodiments, a combination or composition comprises, consists essentially of, or consists of: a U+2-ACTX-Hv1a toxin having an amino acid sequence according to the amino acid sequence set forth in SEQ ID NO: 61, and a boron compound.

[1455] In some embodiments, a combination or composition comprises, consists essentially of, or consists of: a U+2-ACTX-Hv1a toxin having an amino acid sequence according to the amino acid sequence set forth in SEQ ID NO: 61, and a boron compound, wherein the boron compound is a boric acid, diboron tetrahydroxide, a borate, a boron oxide, a borane, or any combination of any of the foregoing.

[1456] In some embodiments, a combination or composition comprises, consists essentially of, or consists of: a U+2-ACTX-Hv1a toxin having an amino acid sequence according to the amino acid sequence set forth in SEQ ID NO: 61, and a boron compound, wherein the boron compound is a borane and/or a borate ester that produces oxides of boron in aqueous media.

[1457] In some embodiments, a combination or composition comprises, consists essentially of, or consists of: a U+2-ACTX-Hv1a toxin having an amino acid sequence according to the amino acid sequence set forth in SEQ ID NO: 61, and a boron compound, wherein the boron compound is a boric acid, a borate (e.g., basic sodium borate (borax)), or a mixture of boric acid and a borate.

[1458] In some embodiments, a combination or composition comprises, consists essentially of, or consists of: a U+2-ACTX-Hv1a toxin having an amino acid sequence according to the amino acid sequence set forth in SEQ ID NO: 61, and a boron compound, wherein the boron compound is a borate.

[1459] In some embodiments, a combination or composition comprises, consists essentially of, or consists of: a U+2-ACTX-Hv1a toxin having an amino acid sequence according to the amino acid sequence set forth in SEQ ID NO: 61, and a borate, wherein the borate is selected from: perborates, metaborates, tetraborates, octaborates, borate esters, and any combination thereof.

[1460] In some embodiments, a combination or composition comprises, consists essentially of, or consists of: a U+2-ACTX-Hv1a toxin having an amino acid sequence according to the amino acid sequence set forth in SEQ ID NO: 61, and a boron compound, wherein the boron compound is a borate, wherein the borate is selected from: metallic borates (e.g., sodium borate, zinc borate and potassium borate), such as disodium tetraborate decahydrate, disodium octaborate tetrahydrate, sodium metaborate, sodium perborate monohydrate, disodium octaborate, sodium tetraborate pentahydrate, sodium tetraborate, copper metaborate, zinc borate, barium metaborate, and any combination thereof.

[1461] In some embodiments, a combination or composition comprises, consists essentially of, or consists of: a U+2-ACTX-Hv1a toxin having an amino acid sequence according to the amino acid sequence set forth in SEQ ID NO: 61, and a boron compound, wherein the boron compound is a borax (e.g., sodium borate decahydrate-10 mol Na₂B₄O₇·10H₂O or sodium borate pentahydrate-5 mol Na₂B₄O₇·5H₂O).

[1462] In some embodiments, a combination or composition comprises, consists essentially of, or consists of: a U+2-ACTX-Hv1a toxin having an amino acid sequence according to the amino acid sequence set forth in SEQ ID NO: 61, and a boron compound, wherein the boron compound is a boron compound that may be utilized in effective amounts as substitutes for borax (or may be utilized in effective amounts in combination with borax or one another).

[1463] In some embodiments, a combination or composition comprises, consists essentially of, or consists of: a U+2-ACTX-Hv1a toxin having an amino acid sequence according to the amino acid sequence set forth in SEQ ID NO: 61, and a borax.

[1464] In some embodiments, a combination or composition comprises, consists essentially of, or consists of: a U+2-ACTX-Hv1a toxin having an amino acid sequence according to the amino acid sequence set forth in SEQ ID NO: 61, and a borax, wherein the borax is selected from: anhydrous borax (Na₂B₄O₇); ammonium tetraborate ((NH₄)₂B₄O₇·4H₂O); ammonium pentaborate ((NH₄)₂B₁₀O₁₆·8H₂O); potassium pentaborate (K2B₁₀O₁₆·8H₂O); potassium tetraborate (K2B₄O₇·4H₂O); sodium metaborate ((8 mol) Na₂B₂O₄·8H₂O); sodium metaborate ((4 mol) Na₂B₂O₄·4H₂O); disodium tetraborate decahydrate (Na₂B₄O₇·10H₂O); disodium tetraborate pentahydrate (Na₂B₄O₇·5H₂O); disodium octaborate tetrahydrate (Na₂B₈O₁₃·4H₂O); or combinations thereof.

[1465] In some embodiments, a combination or composition comprises, consists essentially of, or consists of: a U+2-ACTX-Hv1a toxin having an amino acid sequence according to the amino acid sequence set forth in SEQ ID NO: 61, and a boron compound, wherein the boron compound is selected from the group consisting of: borax, boric acid, disodium octaborate, sodium borate, sodium metaborate, sodium tetraborate decahydrate, boron oxide, boron carbide, boron nitride, boron tribromide, boron trichloride, and boron trifluoride.

[1466] In some embodiments, a combination or composition comprises, consists essentially of, or consists of: a U+2-ACTX-Hv1a toxin having an amino acid sequence according to the amino acid sequence set forth in SEQ ID NO: 61, and boric acid.

[1467] In some embodiments, a combination or composition comprises, consists essentially of, or consists of: a U+2-ACTX-Hv1a toxin having an amino acid sequence according to the amino acid sequence set forth in SEQ ID NO: 61, and boric acid, wherein the boric acid having a chemical formula of H₃BO₃.

[1468] In some embodiments, a combination or composition comprises, consists essentially of, or consists of: a U+2-ACTX-Hv1a toxin having an amino acid sequence according to the amino acid sequence set forth in SEQ ID NO: 61, and a boric acid having a chemical formula of H₃BO₃, wherein the combination or composition comprises a concentration of the U+2-ACTX-Hv1a toxin having an amino acid sequence according to the amino acid sequence set forth in SEQ ID NO: 61 ranging from about 0.0001% w/w, 0.0005% w/w, 0.001% w/w, 0.005% w/w, 0.01% w/w, 0.02% w/w, 0.03% w/w, 0.04% w/w, 0.05% w/w, 0.06% w/w, 0.07% w/w, 0.08% w/w, 0.09% w/w, 0.1% w/w, 0.2% w/w, 0.3% w/w, 0.4% w/w, 0.5% w/w, 0.6% w/w, 0.7% w/w, 0.8% w/w, 0.9% w/w, 1% w/w, 2% w/w, 3% w/w, 4% w/w, 5% w/w, 6% w/w, 7% w/w, 8% w/w, 9% w/w, 10% w/w, 11% w/w, 12% w/w, 13% w/w, 14% w/w, 15% w/w, 16% w/w, 17% w/w, 18% w/w, 19% w/w, 20% w/w, 21% w/w, 22% w/w, 23% w/w, 24% w/w, 25% w/w, 26% w/w, 27% w/w, 28% w/w, 29% w/w, 30% w/w, 31% w/w, 32% w/w, 33% w/w, 34% w/w, 35% w/w, 36% w/w, 37% w/w, 38% w/w, 39% w/w, 40% w/w, 41% w/w, 42% w/w, 43% w/w, 44% w/w, 45% w/w, 46% w/w, 47% w/w, 48% w/w, 49% w/w, 50% w/w, 51% w/w, 52% w/w, 53% w/w, 54% w/w, 55% w/w, 56% w/w, 57% w/w, 58% w/w, 59% w/w, 60% w/w, 61% w/w, 62% w/w, 63% w/w, 64% w/w, 65% w/w, 66% w/w, 67% w/w, 68% w/w, 69% w/w, 70% w/w, 71% w/w, 72% w/w, 73% w/w, 74% w/w, 75% w/w, 76% w/w, 77% w/w, 78% w/w, 79% w/w, 80% w/w, 81% w/w, 82% w/w, 83% w/w, 84% w/w, 85% w/w, 86% w/w, 87% w/w, 88% w/w, 89% w/w, 90% w/w, 91% w/w, 92% w/w, 93% w/w, 94% w/w, 95% w/w, 96% w/w, 97% w/w, 98% w/w, 99% w/w, 99.1% w/w, 99.2% w/w, 99.3% w/w, 99.4% w/w, 99.5% w/w, 99.6% w/w, 99.7% w/w, 99.8% w/w, or about 99.9% w/w of the total composition.

[1469] In some embodiments, a combination or composition comprises, consists essentially of, or consists of: a U+2-ACTX-Hv1a toxin having an amino acid sequence according to the amino acid sequence set forth in SEQ ID NO: 61, and a boric acid having a chemical formula of H₃BO₃, wherein the combination or composition comprises a concentration of the boric acid having a chemical formula of H₃BO₃ ranging from about 0.0001% w/w, 0.0005% w/w, 0.001% w/w, 0.005% w/w, 0.01% w/w, 0.02% w/w, 0.03% w/w, 0.04% w/w, 0.05% w/w, 0.06% w/w, 0.07% w/w, 0.08% w/w, 0.09% w/w, 0.1% w/w, 0.2% w/w, 0.3% w/w, 0.4% w/w, 0.5% w/w, 0.6% w/w, 0.7% w/w, 0.8% w/w, 0.9% w/w, 1% w/w, 2% w/w, 3% w/w, 4% w/w, 5% w/w, 6% w/w, 7% w/w, 8% w/w, 9% w/w, 10% w/w, 11% w/w, 12% w/w, 13% w/w, 14% w/w, 15% w/w, 16% w/w, 17% w/w, 18% w/w, 19% w/w, 20% w/w, 21% w/w, 22% w/w, 23% w/w, 24% w/w, 25% w/w, 26% w/w, 27% w/w, 28% w/w, 29% w/w, 30% w/w, 31% w/w, 32% w/w, 33% w/w, 34% w/w, 35% w/w, 36% w/w, 37% w/w, 38% w/w, 39% w/w, 40% w/w, 41% w/w, 42% w/w, 43% w/w, 44% w/w, 45% w/w, 46% w/w, 47% w/w, 48% w/w, 49% w/w, 50% w/w, 51% w/w, 52% w/w, 53% w/w, 54% w/w, 55% w/w, 56% w/w, 57% w/w, 58% w/w, 59% w/w, 60% w/w, 61% w/w, 62% w/w, 63% w/w, 64% w/w, 65% w/w, 66% w/w, 67% w/w, 68% w/w, 69% w/w, 70% w/w, 71% w/w, 72% w/w, 73% w/w, 74% w/w, 75% w/w, 76% w/w, 77% w/w, 78% w/w, 79% w/w, 80% w/w, 81% w/w, 82% w/w, 83% w/w, 84% w/w, 85% w/w, 86% w/w, 87% w/w, 88% w/w, 89% w/w, 90% w/w, 91% w/w, 92% w/w, 93% w/w, 94% w/w, 95% w/w, 96% w/w, 97% w/w, 98% w/w, 99% w/w, 99.1% w/w, 99.2% w/w, 99.3% w/w, 99.4% w/w, 99.5% w/w, 99.6% w/w, 99.7% w/w, 99.8% w/w, or about 99.9% w/w of the total composition.

[1470] Combinations: Exemplary Combinations of Viruses and U+2-ACTX-Hv1a

[1471] In some embodiments, a combination or composition comprises, consists essentially of, or consists of: a U+2-ACTX-Hv1a toxin having an amino acid sequence according to the amino acid sequence set forth in SEQ ID NO: 61, and a virus that possesses an insecticidal activity when in contact with an insect species.

[1472] In some embodiments, a combination or composition comprises, consists essentially of, or consists of: a U+2-ACTX-Hv1a toxin having an amino acid sequence according to the amino acid sequence set forth in SEQ ID NO: 61, and a DNA virus or an RNA virus.

[1473] In some embodiments, a combination or composition comprises, consists essentially of, or consists of: a U+2-ACTX-Hv1a toxin having an amino acid sequence according to the amino acid sequence set forth in SEQ ID NO: 61, and an ascovirus; baculovirus; densovirus; entomopoxvirus; hytrosavirus; iridovirus; nudivirus; polydnavirus; dicistrovirus; iflavirus; nodavirus; tetravirus; or cypovirus.

[1474] In some embodiments, a combination or composition comprises, consists essentially of, or consists of: a U+2-ACTX-Hv1a toxin having an amino acid sequence according to the amino acid sequence set forth in SEQ ID NO: 61, and a virus from the Ascoviridae family.

[1475] In some embodiments, a combination or composition comprises, consists essentially of, or consists of: a U+2-ACTX-Hv1a toxin having an amino acid sequence according to the amino acid sequence set forth in SEQ ID NO: 61, and an ascovirus such as Heliothis virescens ascovirus 3a; Heliothis virescens ascovirus 3; Heliothis virescens ascovirus 3b; Heliothis virescens ascovirus 3c; Heliothis virescens ascovirus 3d; Heliothis virescens ascovirus 3e; Heliothis virescens ascovirus 3f; Heliothis virescens ascovirus 3g; Heliothis virescens ascovirus 3h; Heliothis virescens ascovirus 3j; Spodoptera frugiperda ascovirus 1a; Trichoplusia ni ascovirus 2a; Heliothis virescens ascovirus 3i; Spodoptera ascovirus; Spodoptera exigua ascovirus 5a; Spodoptera frugiperda ascovirus 1c; Spodoptera frugiperda ascovirus 1d; Trichoplusia ni ascovirus 2b; Trichoplusia ni ascovirus 2c; Trichoplusia ni ascovirus 2d; or Trichoplusia ni ascovirus 6b.

[1476] In some embodiments, a combination or composition comprises, consists essentially of, or consists of: a U+2-ACTX-Hv1a toxin having an amino acid sequence according to the amino acid sequence set forth in SEQ ID NO: 61, and a virus from the Ascoviridae family.

[1477] In some embodiments, a combination or composition comprises, consists essentially of, or consists of: a U+2-ACTX-Hv1a toxin having an amino acid sequence according to the amino acid sequence set forth in SEQ ID NO: 61, and a toursvirus such as Diadromus pulchellus toursvirus; Diadromus pulchellus ascovirus 4a; or Dasineura jujubifolia toursvirus 2a.

[1478] In some embodiments, a combination or composition comprises, consists essentially of, or consists of: a U+2-ACTX-Hv1a toxin having an amino acid sequence according to the amino acid sequence set forth in SEQ ID NO: 61, and a virus from the Densovirinae family.

[1479] In some embodiments, a combination or composition comprises, consists essentially of, or consists of: a U+2-ACTX-Hv1a toxin having an amino acid sequence according to the amino acid sequence set forth in SEQ ID NO: 61, and an Ambidensovirus.

[1480] In some embodiments, a combination or composition comprises, consists essentially of, or consists of: a U+2-ACTX-Hv1a toxin having an amino acid sequence according to the amino acid sequence set forth in SEQ ID NO: 61, and an Ambidensovirus selected from the following group: Asteroid ambidensovirus 1; Sea star-associated densovirus; Blattodean ambidensovirus 1; Periplaneta fuliginosa densovirus; Periplaneta fuliginosa densovirus Guo/2000; Blattodean ambidensovirus 2; Blattella germanica densovirus 1; Decapod ambidensovirus 1; Cherax quadricarinatus densovirus; Dipteran ambidensovirus 1; Culex pipiens densovirus; Hemipteran ambidensovirus 1; Planococcus citri densovirus; Hemipteran ambidensovirus 2; Dysaphis plantaginea densovirus; Hemipteran ambidensovirus 3; Myzus persicae densovirus; Myzus persicae nicotianae densovirus; Hymenopteran ambidensovirus 1; Solenopsis invicta densovirus; Lepidopteran ambidensovirus 1; Galleria mellonella densovirus; Junonia coenia densovirus; Junonia coenia densovirus pBRJ/1990; Mythimna loreyi densovirus; Pseudoplusia includens densovirus; Orthopteran ambidensovirus 1; Acheta domestica densovirus; unclassified Ambidensovirus; Tetranychus urticae-associated ambidensovirus; unclassified Densovirus; Ambidensovirus CaaDV1; Ambidensovirus CaaDV2; Atrato Denso-like virus; Atrato Denso-like virus 1; Densovirus SC1065; Densovirus SC1118; Densovirus SC116; Densovirus SC2121; Densovirus SC2209; Densovirus SC2228; Densovirus SC2886; Densovirus SC3749;

[1481] Densovirus SC3908; Densovirus SC4092; Densovirus SC444; Densovirus SC525; Diaphorina citri densovirus; Diatraea saccharalis densovirus; Lupine feces-associated densovirus; Lupine feces-associated densovirus 2; or Ambidensovirus sp.

[1482] In some embodiments, a combination or composition comprises, consists essentially of, or consists of: a U+2-ACTX-Hv1a toxin having an amino acid sequence according to the amino acid sequence set forth in SEQ ID NO: 61, and a virus from the Entomopoxvirinae family.

[1483] In some embodiments, a combination or composition comprises, consists essentially of, or consists of: a U+2-ACTX-Hv1a toxin having an amino acid sequence according to the amino acid sequence set forth in SEQ ID NO: 61, and an Alphaentomopoxvirus; Betaentomopoxvirus; Diachasmimorpha entomopoxvirus; Melanoplus sanguinipes entomopoxvirus; or some heretofore unclassified Entomopoxvirinae.

[1484] In some embodiments, a combination or composition comprises, consists essentially of, or consists of: a U+2-ACTX-Hv1a toxin having an amino acid sequence according to the amino acid sequence set forth in SEQ ID NO: 61, and an Entomopoxvirinae family virus selected from the following group: Anomala cuprea entomopoxvirus; Adoxophyes honmai entomopoxvirus; Adoxophyes honmai entomopoxvirus ‘L’; Amsacta moorei entomopoxvirus; Choristoneura biennis entomopoxvirus; Choristoneura fumiferana entomopoxvirus; Choristoneura rosaceana entomopoxvirus; Choristoneura rosaceana entomopoxvirus ‘L’; Heliothis armigera entomopoxvirus; Mythimna separata entomopoxvirus; Mythimna separata entomopoxvirus ‘L’; unclassified Betaentomopoxvirus; Diachasmimorpha longicaudata entomopoxvirus; Melanoplus sanguinipes entomopoxvirus ‘O’; Anacridium aegyptium entomopoxvirus; Calliptamus italicus entomopoxvirus; Chironomus decorus entomopoxvirus; Gomphocerus sibiricus entomopoxvirus; Homona coffearia entomopoxvirus; Linepithema humile entomopoxvirus 1; Oedaleus asiaticus entomopoxvirus; or Pseudaletia separata entomopoxvirus.

[1485] In some embodiments, a combination or composition comprises, consists essentially of, or consists of: a U+2-ACTX-Hv1a toxin having an amino acid sequence according to the amino acid sequence set forth in SEQ ID NO: 61, and an Iridoviridae family virus, e.g., an Iridovirus.

[1486] In some embodiments, a combination or composition comprises, consists essentially of, or consists of: a U+2-ACTX-Hv1a toxin having an amino acid sequence according to the amino acid sequence set forth in SEQ ID NO: 61, and an Iridoviridae family virus selected from the following group: Tipula iridescent virus; Invertebrate iridescent virus 31; Armadillidium vulgare iridescent virus; Popillia japonica iridescent virus; Porcellio scaber iridescent virus; Invertebrate iridescent virus 6; Gryllus bimaculatus iridovirus; unclassified Iridovirus; Acetes erythraeus iridovirus; Anticarsia gemmatalis iridescent virus; Armadillidium decorum iridescent virus; Barramundi perch iridovirus; Bluegill sunfish iridovirus; Common ponyfish iridovirus; Crimson snapper iridovirus; Decapterus macrosoma iridovirus; Gazza minuta iridovirus; Invertebrate iridescent virus 16; Costelytra zealandica iridescent virus; Invertebrate iridescent virus 2; Sericesthis iridescent virus; Invertebrate iridescent virus 23; Heteronychus arator iridescent virus; Invertebrate iridescent virus 24; Apis cerana iridescent virus; Invertebrate iridescent virus 29; Tenebrio molitor iridescent virus; Iridovirus barramundi/Quang Ninh/VNM/2008; Iridovirus IV31; Japanese sea bass iridovirus; Lagocephalus sceleratus iridovirus; Lates calcarifer iridovirus; Leiognathus splendens iridovirus; Marble goby iridovirus; Orbiculate batfish iridovirus; Parapristipoma trilineatum iridovirus; Perch iridovirus 603-2/China; Polydactylus sextarius iridovirus; Porcellio siculoccidentalis iridescent virus; Pyrrhalta luteola iridescent virus; Rana temporaria United Kingdom iridovirus 1; Rana temporaria United Kingdom iridovirus 2; Silver sea bream iridovirus; Snakehead iridovirus; Stone flounder iridovirus 603-3/China; Stone flounder iridovirus 724/China; Sturgeon iridovirus; Synodus indicus iridovirus; or Trichoniscus panormidensis iridescent virus.

[1487] In some embodiments, a combination or composition comprises, consists essentially of, or consists of: a U+2-ACTX-Hv1a toxin having an amino acid sequence according to the amino acid sequence set forth in SEQ ID NO: 61, and an Nudiviridae family virus, e.g., an Alphanudivirus, a Betanudivirus, or some heretofore unclassified Nudiviridae family virus

[1488] In some embodiments, a combination or composition comprises, consists essentially of, or consists of: a U+2-ACTX-Hv1a toxin having an amino acid sequence according to the amino acid sequence set forth in SEQ ID NO: 61, and an Nudiviridae family virus selected from the following group: Gryllus bimaculatus nudivirus; Oryctes rhinoceros nudivirus; Heliothis zea nudivirus; Helicoverpa zea nudivirus 2; Allomyrina virus; Drosophila innubila nudivirus; Drosophila nudivirus RLU-2011; Esparto virus; Homarus gammarus nudivirus; Kallithea virus; Macrobrachium nudivirus CN-SL2011; Mauternbach virus; Nilaparvata lugens endogenous nudivirus; Penaeus monodon nudivirus; Tipula oleracea nudivirus; or Tomelloso virus.

[1489] In some embodiments, a combination or composition comprises, consists essentially of, or consists of: a U+2-ACTX-Hv1a toxin having an amino acid sequence according to the amino acid sequence set forth in SEQ ID NO: 61, and an Iflaviridae family virus selected from the following group: Antheraea pernyi iflavirus; Brevicoryne brassicae virus; Brevicoryne brassicae virus—UK; Deformed wing virus; Kakugo virus; VDV-1/DWV recombinant; Dinocampus coccinellae paralysis virus; Ectropis obliqua virus; Ectropis obliqua picorna-like virus; Infectious flacherie virus; Infectious flacherie virus isolate silkworm; Ixodes holocyclus iflavirus; Lygus lineolaris virus 1; Lymantria dispar iflavirus 1; Nilaparvata lugens honeydew virus 1; Perina nuda virus; Sacbrood virus; Sacbrood virus CSBV-LN/China/2009; Slow bee paralysis virus; Spodoptera exigua iflavirus 1; Spodoptera exigua iflavirus 2; Varroa destructor virus 1; unclassified Iflavirus; ACT flea iflavirus; Aedes vexans iflavirus; Armigeres iflavirus; Bat iflavirus; Bee iflavirus 1; Blackberry iflavirus A; Blackberry iflavirus B; Bombyx mori iflavirus; Breves iflavirus; Diamondback moth iflavirus; Formica exsecta virus 2; Haemaphysalis flava iflavirus; Heliconius erato iflavirus; Helicoverpa armigera iflavirus; Midge iflavirus 9000; Miniopterus fuliginosus iflavirus; Moku virus; Nasonia vitripennis virus; Pirizal iflavirus; Psammotettix alienus iflavirus 1; Rondonia iflavirus 1; Rondonia iflavirus 2; Scaphoideus titanus iflavirus 1; Scaphoideus titanus iflavirus 2; VDV-1/DWV recombinant 4; Vespa velutina Moku virus; or Xysticus cristatus iflavirus.

[1490] In some embodiments, a combination or composition comprises, consists essentially of, or consists of: a U+2-ACTX-Hv1a toxin having an amino acid sequence according to the amino acid sequence set forth in SEQ ID NO: 61, and a virus from the Baculoviridae family.

[1491] In some embodiments, a combination or composition comprises, consists essentially of, or consists of: a U+2-ACTX-Hv1a toxin having an amino acid sequence according to the amino acid sequence set forth in SEQ ID NO: 61, and an Alphabaculovirus, Betabaculovirus, Deltabaculovirus, Gammabaculovirus, or heretofore unclassified Baculoviridae virus.

[1492] In some embodiments, a combination or composition comprises, consists essentially of, or consists of: a U+2-ACTX-Hv1a toxin having an amino acid sequence according to the amino acid sequence set forth in SEQ ID NO: 61, and an Alphabaculovirus virus selected from the following group: Adoxophyes honmai nucleopolyhedrovirus; Agrotis ipsilon multiple nucleopolyhedrovirus; Agrotis segetum nucleopolyhedrovirus A; Agrotis segetum nucleopolyhedrovirus B; Antheraea pernyi nucleopolyhedrovirus; Antheraea proylei nucleopolyhedrovirus; Philosamia cynthia ricini nucleopolyhedrovirus virus; Anticarsia gemmatalis multiple nucleopolyhedrovirus; Autographa californica multiple nucleopolyhedrovirus; Anagrapha falcifera MNPV; Autographa californica nucleopolyhedrovirus; Galleria mellonella MNPV; Plutella xylostella multiple nucleopolyhedrovirus; Rachiplusia nu MNPV; Rachiplusia ou MNPV; Bombyx mori nucleopolyhedrovirus; Bombyx mandarina nucleopolyhedrovirus; Bombyx mandarina nucleopolyhedrovirus S2; Bombyx mori nuclear polyhedrosis virus K1; Buzura suppressaria nucleopolyhedrovirus; Catopsilia pomona nucleopolyhedrovirus; Choristoneura fumiferana DEF multiple nucleopolyhedrovirus; Choristoneura fumiferana multiple nucleopolyhedrovirus; Choristoneura occidentalis alphabaculovirus; Choristoneura murinana nucleopolyhedrovirus; Choristoneura rosaceana nucleopolyhedrovirus; Chrysodeixis chalcites nucleopolyhedrovirus; Chrysodeixis chalcites SNPV TF1-A; Chrysodeixis includens nucleopolyhedrovirus; Pseudoplusia includens SNPV IE; Clanis bilineata nucleopolyhedrovirus; Dasychira pudibunda nucleopolyhedrovirus; Ectropis obliqua nucleopolyhedrovirus; Epiphyas postvittana nucleopolyhedrovirus; Euproctis pseudoconspersa nucleopolyhedrovirus; Helicoverpa armigera nucleopolyhedrovirus; Helicoverpa armigera NPV NNg1; Helicoverpa armigera NPV strain Australia; Helicoverpa armigera nucleopolyhedrovirus G4; Helicoverpa armigera SNPV; Helicoverpa SNPV AC53; Helicoverpa zea single nucleopolyhedrovirus; Hemileuca species nucleopolyhedrovirus; Hemileuca sp. nucleopolyhedrovirus; Hyphantria cunea nucleopolyhedrovirus; Lambdina fiscellaria nucleopolyhedrovirus; Leucania separata nucleopolyhedrovirus; Lonomia obliqua nucleopolyhedrovirus; Lonomia obliqua multiple nucleopolyhedrovirus; Lymantria dispar multiple nucleopolyhedrovirus; Lymantria xylina nucleopolyhedrovirus; Mamestra brassicae multiple nucleopolyhedrovirus; Mamestra configurata nucleopolyhedrovirus A; Mamestra configurata nucleopolyhedrovirus B; Helicoverpa armigera multiple nucleopolyhedrovirus; Maruca vitrata nucleopolyhedrovirus; Mythimna unipuncta nucleopolyhedrovirus; Operophtera brumata nucleopolyhedrovirus; Orgyia leucostigma nucleopolyhedrovirus; Orgyia pseudotsugata multiple nucleopolyhedrovirus; Oxyplax ochracea nucleopolyhedrovirus; Perigonia lusca nucleopolyhedrovirus; Perigonia lusca single nucleopolyhedrovirus; Spodoptera exigua multiple nucleopolyhedrovirus; Spodoptera exigua nuclear polyhedrosis virus (strain US); Spodoptera frugiperda multiple nucleopolyhedrovirus; Spodoptera littoralis nucleopolyhedrovirus; Spodoptera litura nucleopolyhedrovirus; Sucra jujuba nucleopolyhedrovirus; Thysanoplusia orichalcea nucleopolyhedrovirus; Trichoplusia ni single nucleopolyhedrovirus; Wiseana signata nucleopolyhedrovirus; unclassified Alphabaculovirus; Abraxas grossulariata nucleopolyhedrovirus; Actias selene nucleopolyhedrovirus; Adoxophyes orana nucleopolyhedrovirus; Agraulis vanillae MNPV; Agrotis exclamationis nucleopolyhedrovirus; Agrotis ipsilon multicapsid nucleopolyhedrovirus; Amorbia cuneacapsa nucleopolyhedrovirus; Amorbia cuneana nucleopolyhedrovirus; Ampelophaga rubiginosa nucleopolyhedrovirus; Amsacta albistriga nucleopolyhedrovirus; Anagrapha falcifera multiple nucleopolyhedrovirus; Antheraea polyphemus nucleopolyhedrovirus; Anticarsia gemmatalis nucleopolyhedrovirus; Apocheima cinerarium nucleopolyhedrovirus; Aporia crataegi nucleopolyhedrovirus; Archips cerasivoranus nuclear polyhedrosis virus; Archips rosanus nucleopolyhedrovirus; Attacus ricini nuclear polyhedrosis virus; Autographa biloba nucleopolyhedrovirus; Autographa gamma nucleopolyhedrovirus; Autographa nigrisigna nucleopolyhedrovirus; Boarmia bistortata nucleopolyhedrovirus; Bombyx mandarina nuclear polyhedrosis virus; Busseola fusca nucleopolyhedrovirus; Catposilia pomona nucleopolyhedrovirus; Cerapteryx graminis nucleopolyhedrovirus; Choristoneura diversana nucleopolyhedrovirus; Choristoneura occidentalis nucleopolyhedrovirus; Chorizagrotis auxiliaris nucleopolyhedrovirus; Chrysodeixis includens NPV; Coloradia pandora alphabaculovirus; Coloradia pandora nucleopolyhedrovirus; Condylorrhiza vestigialis MNPV; Condylorrhiza vestigialis multiple nucleopolyhedrovirus; Cryptophlebia peltastica nucleopolyhedrovirus; Cyclophragma undans nucleopolyhedrovirus; Dasychira plagiata nucleopolyhedrovirus; Dendrolimus kikuchii nucleopolyhedrovirus; Diaphania pulverulentalis nucleopolyhedrovirus; Dione Juno MNPV tmk1/ARG/2003; Dione Juno nucleopolyhedrovirus; Dirphia peruvianus nucleopolyhedrovirus; Ectropis grisescens nucleopolyhedrovirus; Epinotia granitalis nucleopolyhedrovirus; Euproctis digramma nucleopolyhedrovirus; Gilpinia hercyniae nucleopolyhedrovirus; Heliconius erato nucleopolyhedrovirus; Helicoverpa assulta nucleopolyhedrovirus; Helicoverpa gelotopoeon single nucleopolyhedrovirus; Heliothis peltigera SNPV; Heliothis zea nuclear polyhedrosis virus; Hemerocampa vetusta nucleopolyhedrovirus; Hemileuca alphabaculovirus; Hyposidra infixaria NPV; Hyposidra talaca NPV; Iragoides fasciata nucleopolyhedrovirus; Junonia coenia nucleopolyhedrovirus; Leucoma salicis nucleopolyhedrovirus; Lymantria mathura mutiple nucleopolyhedrovirus; Lymantria monacha nucleopolyhedrovirus; Lymantria xylina nucleopolyhedrovirus 2; Malacosoma alphabaculovirus; Malacosoma americanum nucleopolyhedrovirus; Malacosoma californicum nucleopolyhedrovirus; Malacosoma californicum pluviale nucleopolyhedrovirus; Malacosoma disstria nucleopolyhedrovirus; Malacosoma neustria nucleopolyhedrovirus; Mamestra configurata nucleopolyhedrovirus; Neophasia alphabaculovirus; Nepytia phantasmaria nucleopolyhedrovirus; Nymphalis io nucleopolyhedrovirus; Oak looper alphabaculovirus; Ophiusa disjungens nucleopolyhedrovirus; Orgyia anartoides nucleopolyhedrovirus; Orgyia ericae nucleopolyhedrovirus; Orgyia pseudotsugata single capsid nuclopolyhedrovirus; Panolis flammea nucleopolyhedrovirus; Peridroma alphabaculovirus; Peridroma margaritosa nucleopolyhedrovirus; Perina nuda nucleopolyhedrovirus; Phryganidia californica nucleopolyhedrovirus; Plusia acuta nucleopolyhedrovirus; Plusia orichalcea nuclear polyhedrosis virus; Plutella maculipennis nucleopolyhedrovirus; Pseudaletia alphabaculovirus; Pseudoplusia includens nucleopolyhedrovirus; Pterolocera amplicornis nucleopolyhedrovirus; Rachiplusia nu nucleopolyhedrovirus; Rachiplusia nu single nucleopolyhedrovirus; Samia cynthia nucleopolyhedrovirus; Spilarctia obliqua nucleopolyhedrovirus; Spilosoma obliqua nucleopolyhedrosis virus; Spilosoma phasma nucleopolyhedrovirus; Spodoptera cosmioides nucleopolyhedrovirus; Spodoptera eridania nucleopolyhedrovirus; Spodoptera exempta nucleopolyhedrovirus; Spodoptera littoralis multicapsid nucleopolyhedrovirus; Spodoptera litura MNPV; Spodoptera litura nucleopolyhedrovirus II; Spodoptera terricola nucleopolyhedrovirus; Tineola bisselliella nucleopolyhedrovirus; Troides aeacus nucleopolyhedrovirus; Wiseana cervinata nucleopolyhedrovirus; Agraulis sp. nucleopolyhedrovirus; Malacosoma sp. alphabaculovirus; Malacosoma sp. nucleopolyhedrovirus; Neophasia sp. alphabaculovirus; or unidentified nuclear polyhedrosis viruses.

[1493] In some embodiments, a combination or composition comprises, consists essentially of, or consists of: a U+2-ACTX-Hv1a toxin having an amino acid sequence according to the amino acid sequence set forth in SEQ ID NO: 61, and a Betabaculovirus virus selected from the following group: Adoxophyes orana granulovirus; Agrotis segetum granulovirus; Artogeia rapae granulovirus; Pieris brassicae granulovirus; Choristoneura fumiferana granulovirus; Choristoneura occidentalis granulovirus; Clostera anachoreta granulovirus; Clostera anastomosis granulovirus A; Clostera anastomosis granulovirus Henan; Clostera anastomosis granulovirus B; Cnaphalocrocis medinalis granulovirus; Cryptophlebia leucotreta granulovirus; Cydia pomonella granulovirus; Cydia pomonella granulosis virus (isolate Mexican); Diatraea saccharalis granulovirus; Epinotia aporema granulovirus; Erinnyis ello granulovirus; Harrisina brillians granulovirus; Helicoverpa armigera granulovirus; Lacanobia oleracea granulovirus; Mocis latipes granulovirus; Mythimna unipuncta granulovirus A; Pseudalatia unipuncta granulovirus; Mythimna unipuncta granulovirus B; Mythimna unipuncta granulovirus; Phthorimaea operculella granulovirus; Plodia interpunctella granulovirus; Plutella xylostella granulovirus; Spodoptera frugiperda granulovirus; Spodoptera litura granulovirus; Trichoplusia ni granulovirus;

[1494] Trichoplusia ni granulovirus LBIV-12; Xestia c-nigrum granulovirus; Achaea Janata granulovirus; Adoxophyes honmai granulovirus; Agrotis exclamationis granulovirus; Amelia pallorana granulovirus; Andraca bipunctata granulovirus; Autographa gamma granulovirus; Caloptilia theivora granulovirus; Choristoneura murinana granulovirus; Choristoneura viridis betabaculovirus; Clostera anastomosis granulovirus; Cnephasia longana granulovirus; Estigmene acrea granulovirus; Euxoa ochrogaster granulovirus; Heliothis armigera granulovirus; Hoplodrina ambigua granulovirus; Hyphantria cunea granulovirus; Natada nararia granulovirus; Nephelodes emmedonia granulovirus; Pandemis limitata granulovirus; Peridorma morpontora granulovirus; Pieris rapae granulovirus; Plathypena scabra granulovirus; Pseudaletia betabaculovirus; Scotogramma trifolii granulovirus; Spodoptera androgea granulovirus; Spodoptera littoralis granulovirus; Tecia solanivora granulovirus; or Mocis sp. granulovirus.

[1495] In some embodiments, a combination or composition comprises, consists essentially of, or consists of: a U+2-ACTX-Hv1a toxin having an amino acid sequence according to the amino acid sequence set forth in SEQ ID NO: 61, and a Deltabaculovirus virus selected from the following group: Culex nigripalpus nucleopolyhedrovirus; or Culex nigripalpus NPV Florida/1997.

[1496] In some embodiments, a combination or composition comprises, consists essentially of, or consists of: a U+2-ACTX-Hv1a toxin having an amino acid sequence according to the amino acid sequence set forth in SEQ ID NO: 61, and a Gammabaculovirus virus selected from the following group: Neodiprion lecontei nucleopolyhedrovirus; Neodiprion lecontei NPV (strain Canada); Neodiprion sertifer nucleopolyhedrovirus; unclassified Gammabaculovirus; or Neodiprion abietis NPV.

[1497] In some embodiments, a combination or composition comprises, consists essentially of, or consists of: a U+2-ACTX-Hv1a toxin having an amino acid sequence according to the amino acid sequence set forth in SEQ ID NO: 61, and a heretofore unclassified Baculoviridae virus selected from the following group: Achaea faber nucleopolyhedrovirus; Aedes sollicitans nucleopolyhedrovirus; Aglais urticae nucleopolyhedrovirus; Agraulis vanillae nucleopolyhedrovirus; Anomis sabulifera nucleopolyhedrovirus; Antheraea yamamai nucleopolyhedrovirus; Anthophila fabriciana granulovirus; Aroa discalis nucleopolyhedrovirus; Baculovirus penaei; Cadra cautella nucleopolyhedrovirus; Chaliopsis junodi nucleopolyhedrovirus; Cotesia marginiventris baculovirus; Cynosarga ornata nucleopolyhedrovirus; Darna nararia granulovirus; Darna trima granulovirus; Erannis defoliaria nucleopolyhedrovirus; Euplexia lucipara granulovirus;

[1498] Euproctis chrysorrhoea nucleopolyhedrovirus; Euproctis similis nucleopolyhedrovirus; Gonad-specific virus; Homona coffearia granulovirus; Hyblaea puera nucleopolyhedrovirus; Idaea seriata nucleopolyhedrovirus; Junonia coenia granulovirus; Lasiocampa quercus nucleopolyhedrovirus; Lemyra imparilis nucleopolyhedrovirus; Mahasena corbetti nucleopolyhedrovirus; Melanchra persicariae granulovirus; Operophtera bruceata nucleopolyhedrovirus; Orgyia antiqua nucleopolyhedrovirus; Orgyia mixta nucleopolyhedrovirus; Pachytrina philargyria nucleopolyhedrovirus; Pareuchaetes pseudoinsulata nucleopolyhedrovirus; Penaeus monodon nucleopolyhedrovirus; Phalera bucephala nucleopolyhedrovirus; Polygonia c-album nucleopolyhedrovirus; Samia ricini nucleopolyhedrovirus; Spilosoma lutea granulovirus; Spodoptera albula nucleopolyhedrovirus; Trabala vishnou nucleopolyhedrovirus; Uranotaenia sapphirina nucleopolyhedrovirus; Urbanus proteus nucleopolyhedrovirus; Utetheisa pulchella nucleopolyhedrovirus; Vanessa atalanta nucleopolyhedrovirus; Vanessa cardui nucleopolyhedrovirus; Wiseana cervinata granulovirus; or Baculoviridae sp.

[1499] In some embodiments, a combination or composition comprises, consists essentially of, or consists of: a U+2-ACTX-Hv1a toxin having an amino acid sequence according to the amino acid sequence set forth in SEQ ID NO: 61, and a Baculoviridae virus

[1500] In some embodiments, a combination or composition comprises, consists essentially of, or consists of: a U+2-ACTX-Hv1a toxin having an amino acid sequence according to the amino acid sequence set forth in SEQ ID NO: 61, and a Betabaculovirus.

[1501] In some embodiments, a combination or composition comprises, consists essentially of, or consists of: a U+2-ACTX-Hv1a toxin having an amino acid sequence according to the amino acid sequence set forth in SEQ ID NO: 61, and a Adoxophyes orana granulovirus; a Agrotis segetum granulovirus; a Artogeia rapae granulovirus; a Pieris brassicae granulovirus; a Choristoneura fumiferana granulovirus; a Choristoneura occidentalis granulovirus; a Clostera anachoreta granulovirus; a Clostera anastomosis granulovirus A; a Clostera anastomosis granulovirus Henan; a Clostera anastomosis granulovirus B; a Cnaphalocrocis medinalis granulovirus; a Cryptophlebia leucotreta granulovirus; a Cydia pomonella granulovirus; a Cydia pomonella granulosis virus (isolate Mexican); a Diatraea saccharalis granulovirus; a Epinotia aporema granulovirus; a Erinnyis ello granulovirus; a Harrisina brillians granulovirus; a Helicoverpa armigera granulovirus; a Lacanobia oleracea granulovirus; a Mocis latipes granulovirus; a Mythimna unipuncta granulovirus A; a Pseudalatia unipuncta granulovirus; a Mythimna unipuncta granulovirus B; a Mythimna unipuncta granulovirus; a Phthorimaea operculella granulovirus; a Plodia interpunctella granulovirus; a Plutella xylostella granulovirus; a Spodoptera frugiperda granulovirus; a Spodoptera litura granulovirus; a Trichoplusia ni granulovirus; a Trichoplusia ni granulovirus LBIV-12; a Xestia c-nigrum granulovirus; a unclassified Betabaculovirus; a Achaea janata granulovirus; a Adoxophyes honmai granulovirus; a Agrotis exclamationis granulovirus; a Amelia pallorana granulovirus; a Andraca bipunctata granulovirus; a Autographa gamma granulovirus; a Caloptilia theivora granulovirus; a Choristoneura murinana granulovirus; a Choristoneura viridis betabaculovirus; a Clostera anastomosis granulovirus; a Cnephasia longana granulovirus; a Estigmene acrea granulovirus; a Euxoa ochrogaster granulovirus; a Heliothis armigera granulovirus; a Hoplodrina ambigua granulovirus; a Hyphantria cunea granulovirus; a Natada nararia granulovirus; a Nephelodes emmedonia granulovirus; a Pandemis limitata granulovirus; a Peridorma morpontora granulovirus; a Pieris rapae granulovirus; a Plathypena scabra granulovirus; a Pseudaletia betabaculovirus; a Scotogramma trifolii granulovirus; a Spodoptera androgea granulovirus; a Spodoptera littoralis granulovirus; a Tecia solanivora granulovirus; or a Mocis sp. Granulovirus.

[1502] In some embodiments, a combination or composition comprises, consists essentially of, or consists of: a U+2-ACTX-Hv1a toxin having an amino acid sequence according to the amino acid sequence set forth in SEQ ID NO: 61, and a Cydia pomonella granulovirus.

[1503] In some embodiments, a combination or composition comprises, consists essentially of, or consists of: a U+2-ACTX-Hv1a toxin having an amino acid sequence according to the amino acid sequence set forth in SEQ ID NO: 61, and a Cydia pomonella granulovirus isolate V22 virus.

[1504] In some embodiments, a combination or composition comprises, consists essentially of, or consists of: a U+2-ACTX-Hv1a toxin having an amino acid sequence according to the amino acid sequence set forth in SEQ ID NO: 61, and a Cydia pomonella granulovirus isolate V22 virus, wherein the combination or composition comprises a concentration of the Cydia pomonella granulovirus isolate V22 virus ranging from about 0.0001% w/w, 0.0005% w/w, 0.001% w/w, 0.005% w/w, 0.01% w/w, 0.02% w/w, 0.03% w/w, 0.04% w/w, 0.05% w/w, 0.06% w/w, 0.07% w/w, 0.08% w/w, 0.09% w/w, 0.1% w/w, 0.2% w/w, 0.3% w/w, 0.4% w/w, 0.5% w/w, 0.6% w/w, 0.7% w/w, 0.8% w/w, 0.9% w/w, 1% w/w, 2% w/w, 3% w/w, 4% w/w, 5% w/w, 6% w/w, 7% w/w, 8% w/w, 9% w/w, 10% w/w, 11% w/w, 12% w/w, 13% w/w, 14% w/w, 15% w/w, 16% w/w, 17% w/w, 18% w/w, 19% w/w, 20% w/w, 21% w/w, 22% w/w, 23% w/w, 24% w/w, 25% w/w, 26% w/w, 27% w/w, 28% w/w, 29% w/w, 30% w/w, 31% w/w, 32% w/w, 33% w/w, 34% w/w, 35% w/w, 36% w/w, 37% w/w, 38% w/w, 39% w/w, 40% w/w, 41% w/w, 42% w/w, 43% w/w, 44% w/w, 45% w/w, 46% w/w, 47% w/w, 48% w/w, 49% w/w, 50% w/w, 51% w/w, 52% w/w, 53% w/w, 54% w/w, 55% w/w, 56% w/w, 57% w/w, 58% w/w, 59% w/w, 60% w/w, 61% w/w, 62% w/w, 63% w/w, 64% w/w, 65% w/w, 66% w/w, 67% w/w, 68% w/w, 69% w/w, 70% w/w, 71% w/w, 72% w/w, 73% w/w, 74% w/w, 75% w/w, 76% w/w, 77% w/w, 78% w/w, 79% w/w, 80% w/w, 81% w/w, 82% w/w, 83% w/w, 84% w/w, 85% w/w, 86% w/w, 87% w/w, 88% w/w, 89% w/w, 90% w/w, 91% w/w, 92% w/w, 93% w/w, 94% w/w, 95% w/w, 96% w/w, 97% w/w, 98% w/w, 99% w/w, 99.1% w/w, 99.2% w/w, 99.3% w/w, 99.4% w/w, 99.5% w/w, 99.6% w/w, 99.7% w/w, 99.8% w/w, or about 99.9% w/w of the total composition.

[1505] In some embodiments, a combination or composition comprises, consists essentially of, or consists of: a U+2-ACTX-Hv1a toxin having an amino acid sequence according to the amino acid sequence set forth in SEQ ID NO: 61, and a Cydia pomonella granulovirus isolate V22 virus, wherein the combination or composition comprises a concentration of the U+2-ACTX-Hy1a toxin having an amino acid sequence according to the amino acid sequence set forth in SEQ ID NO: 61 ranging from about 0.0001% w/w, 0.0005% w/w, 0.001% w/w, 0.005% w/w, 0.01% w/w, 0.02% w/w, 0.03% w/w, 0.04% w/w, 0.05% w/w, 0.06% w/w, 0.07% w/w, 0.08% w/w, 0.09% w/w, 0.1% w/w, 0.2% w/w, 0.3% w/w, 0.4% w/w, 0.5% w/w, 0.6% w/w, 0.7% w/w, 0.8% w/w, 0.9% w/w, 1% w/w, 2% w/w, 3% w/w, 4% w/w, 5% w/w, 6% w/w, 7% w/w, 8% w/w, 9% w/w, 10% w/w, 11% w/w, 12% w/w, 13% w/w, 14% w/w, 15% w/w, 16% w/w, 17% w/w, 18% w/w, 19% w/w, 20% w/w, 21% w/w, 22% w/w, 23% w/w, 24% w/w, 25% w/w, 26% w/w, 27% w/w, 28% w/w, 29% w/w, 30% w/w, 31% w/w, 32% w/w, 33% w/w, 34% w/w, 35% w/w, 36% w/w, 37% w/w, 38% w/w, 39% w/w, 40% w/w, 41% w/w, 42% w/w, 43% w/w, 44% w/w, 45% w/w, 46% w/w, 47% w/w, 48% w/w, 49% w/w, 50% w/w, 51% w/w, 52% w/w, 53% w/w, 54% w/w, 55% w/w, 56% w/w, 57% w/w, 58% w/w, 59% w/w, 60% w/w, 61% w/w, 62% w/w, 63% w/w, 64% w/w, 65% w/w, 66% w/w, 67% w/w, 68% w/w, 69% w/w, 70% w/w, 71% w/w, 72% w/w, 73% w/w, 74% w/w, 75% w/w, 76% w/w, 77% w/w, 78% w/w, 79% w/w, 80% w/w, 81% w/w, 82% w/w, 83% w/w, 84% w/w, 85% w/w, 86% w/w, 87% w/w, 88% w/w, 89% w/w, 90% w/w, 91% w/w, 92% w/w, 93% w/w, 94% w/w, 95% w/w, 96% w/w, 97% w/w, 98% w/w, 99% w/w, 99.1% w/w, 99.2% w/w, 99.3% w/w, 99.4% w/w, 99.5% w/w, 99.6% w/w, 99.7% w/w, 99.8% w/w, or about 99.9% w/w of the total composition.

[1506] Methods of Using the Present Invention

[1507] Methods for Protecting Plants, Plant Parts, and Seeds

[1508] In some embodiments, the present disclosure provides a method for controlling an invertebrate pest in agronomic and/or nonagronomic applications, comprising contacting the invertebrate pest or its environment, a solid surface, including a plant surface or part thereof, with a pesticidally effective amount of a combination of (1) one or more CRIPs, or pharmaceutically acceptable salts thereof; one or more CRIP-insecticidal proteins, or pharmaceutically acceptable salts thereof; or a combination thereof; and (2) one or more Insecticidal Agents (IA), as described herein.

[1509] In some embodiments, the present disclosure provides a method for controlling an invertebrate pest in agronomic and/or nonagronomic applications, comprising contacting the invertebrate pest or its environment, a solid surface, including a plant surface or part thereof, with a pesticidally effective amount of a composition comprising (1) one or more CRIPs, or pharmaceutically acceptable salts thereof; one or more CRIP-insecticidal proteins, or pharmaceutically acceptable salts thereof; or a combination thereof; (2) one or more Insecticidal Agents (IA), as described herein; and (3) one or more excipients. For example, in some embodiments, the composition can comprise: (1) one or more CRIPs set for the in Table A, i.e., A1-A68, (2) one or more Insecticidal Agents set forth in Table B, i.e., B1-B479, and (3) an excipient.

[1510] Examples of suitable compositions comprising: (1) one or more CRIPs, or pharmaceutically acceptable salt thereof; one or more CRIP-insecticidal proteins, or pharmaceutically acceptable salt thereof; or a combination thereof; (2) one or more Insecticidal Agents (IA), as described herein; and (3) one or more excipients, include said compositions formulated win inactive ingredients to be delivered in the form of: a liquid solution, an emulsion, a powder, a granule, a nanoparticle, a microparticle, or a combination thereof.

[1511] In some embodiments, to achieve contact with a compound, mixture, or composition of the invention to protect a field crop from invertebrate pests, the compound or composition is typically applied to the seed of the crop before planting, to the foliage (e.g., leaves, stems, flowers, fruits) of crop plants, or to the soil or other growth medium before or after the crop is planted.

[1512] One embodiment of a method of contact is by spraying. Alternatively, a granular composition comprising: (1) one or more CRIPs, or pharmaceutically acceptable salts thereof; one or more CRIP-insecticidal proteins, or pharmaceutically acceptable salts thereof; or a combination thereof; (2) one or more Insecticidal Agents (IA), as described herein; and (3) one or more excipients, can be applied to the plant foliage or the soil. Compounds of this invention can also be effectively delivered through plant uptake by contacting the plant with a composition comprising a compound of this invention applied as a soil drench of a liquid formulation, a granular formulation to the soil, a nursery box treatment or a dip of transplants. Of note is a composition of the present disclosure in the form of a soil drench liquid formulation. Also of note is a method for controlling an invertebrate pest comprising contacting the invertebrate pest or its environment with a biologically effective amount of a combination of the present invention. Of further note, in some illustrative embodiments, the illustrative method contemplates a soil environment, wherein the composition is applied to the soil as a soil drench formulation. Of further note is that a combination of a CRIP and IA of the present invention is also effective by localized application to the locus of infestation. Other methods of contact include application of a compound or a composition of the invention by direct and residual sprays, aerial sprays, gels, seed coatings, microencapsulations, systemic uptake, baits, ear tags, boluses, foggers, fumigants, aerosols, dusts and many others. One embodiment of a method of contact is a dimensionally stable fertilizer granule, stick or tablet comprising a compound or composition of the invention. The compounds of this invention can also be impregnated into materials for fabricating invertebrate control devices (e.g., insect netting, application onto clothing, application into candle formulations and the like).

[1513] In some embodiments, a combination comprising (1) one or more CRIPs, or pharmaceutically acceptable salts thereof; one or more CRIP-insecticidal proteins, or pharmaceutically acceptable salts thereof; or a combination thereof; (2) one or more Insecticidal Agents (IA), as described herein; and optionally (3) one or more excipients, is also useful in seed treatments for protecting seeds from invertebrate pests. In the context of the present disclosure and claims, treating a seed means contacting the seed with a pesticidally effective amount of a combination of (1) one or more CRIPs, or pharmaceutically acceptable salts thereof; one or more CRIP-insecticidal proteins, or pharmaceutically acceptable salts thereof; or a combination thereof; and (2) one or more Insecticidal Agents (IA), as described herein, which is typically formulated as a composition of the invention. This seed treatment protects the seed from invertebrate soil pests and generally can also protect roots and other plant parts in contact with the soil of the seedling developing from the germinating seed. The seed treatment may also provide protection of foliage by translocation of the (1) one or more CRIPs, or pharmaceutically acceptable salts thereof; one or more CRIP-insecticidal proteins, or pharmaceutically acceptable salts thereof; or a combination thereof; and (2) one or more Insecticidal Agents (IA), as described herein, within the developing plant. Seed treatments can be applied to all types of seeds, including those from which plants genetically transformed to express specialized traits will germinate. In addition, in some embodiments, a CRIP can be transformed into a plant or part thereof, for example a plant cell, or plant seed, that is already transformed, e.g., those expressing herbicide resistance such as glyphosate acetyltransferase, which provides resistance to glyphosate.

[1514] One method of seed treatment is by spraying or dusting the seed with a combination comprising (1) one or more CRIPs, or pharmaceutically acceptable salts thereof; one or more CRIP-insecticidal proteins, or pharmaceutically acceptable salts thereof; or a combination thereof; (2) one or more Insecticidal Agents (IA), as described herein; and (3) one or more excipients, before sowing the seeds. Compositions formulated for seed treatment generally consist of the combination of the present invention, and a film former or adhesive agent. Therefore, typically, a seed coating composition of the present disclosure consists of a pesticidally effective amount of: (1) one or more CRIPs, or pharmaceutically acceptable salts thereof; one or more CRIP-insecticidal proteins, or pharmaceutically acceptable salts thereof; or a combination thereof; (2) one or more Insecticidal Agents (IA), as described herein, and a film former or adhesive agent. Seed can be coated by spraying a flowable suspension concentrate directly into a tumbling bed of seeds and then drying the seeds. Alternatively, other formulation types such as wetted powders, solutions, suspoemulsions, emulsifiable concentrates and emulsions in water can be sprayed on the seed. This process is particularly useful for applying film coatings on seeds. Various coating machines and processes are available to one skilled in the art. Suitable processes include those listed in P. Kosters et al., Seed Treatment: Progress and Prospects, 1994 BCPC Monograph No. 57, and references listed therein, the disclosures of which are incorporated herein by reference in their entireties.

[1515] The treated seed typically comprises a combination of (1) one or more CRIPs, or pharmaceutically acceptable salts thereof; one or more CRIP-insecticidal proteins, or pharmaceutically acceptable salts thereof; or a combination thereof; and (2) one or more Insecticidal Agents (IA), as described herein, in an amount ranging from about 0.01 g to 1 kg per 100 kg of seed (i.e. from about 0.00001 to 1% by weight of the seed before treatment). A flowable suspension formulated for seed treatment typically comprises from about 0.5 to about 70% of the active ingredient, from about 0.5 to about 30% of a film-forming adhesive, from about 0.5 to about 20% of a dispersing agent, from 0 to about 5% of a thickener, from 0 to about 5% of a pigment and/or dye, from 0 to about 2% of an antifoaming agent, from 0 to about 1% of a preservative, and from 0 to about 75% of a volatile liquid diluent.

[1516] Methods of Using Formulations and Compositions

[1517] In some embodiments, the present invention provides a method of using a combination comprising: (1) one or more CRIPs, or pharmaceutically acceptable salts thereof; one or more CRIP-insecticidal proteins, or pharmaceutically acceptable salts thereof; or a combination thereof; (2) one or more Insecticidal Agents (IA), as described herein; and (3) one or more excipients; wherein said method comprises, preparing the composition and then applying said composition to the locus of an insect.

[1518] In some embodiments, the present invention provides a method of using a composition to control insects, said composition comprising (1) one or more CRIPs, or pharmaceutically acceptable salts thereof; one or more CRIP-insecticidal proteins, or pharmaceutically acceptable salts thereof; or a combination thereof; (2) one or more Insecticidal Agents (IA), as described herein; and (3) one or more excipients; wherein the insects are selected from the group consisting of: Achema Sphinx Moth (Hornworm) (Eumorpha achemon); Alfalfa Caterpillar (Colias eurytheme); Almond Moth (Caudra cautella); Amorbia Moth (Amorbia humerosana); Armyworm (Spodoptera spp., e.g. exigua, frugiperda, littoralis, Pseudaletia unipuncta); Artichoke Plume Moth (Platyptilia carduidactyla); Azalea Caterpillar (Datana major); Bagworm (Thyridopteryx); ephemeraeformis); Banana Moth (Hypercompe scribonia); Banana Skipper (Erionota thrax); Blackheaded Budworm (Acleris gloverana); California Oakworm (Phryganidia californica); Spring Cankerworm (Paleacrita merriccata); Cherry Fruitworm (Grapholita packardi); China Mark Moth (Nymphula stagnata); Citrus Cutworm (Xylomyges curia/is); Codling Moth (Cydia pomonella); Cranberry Fruitworm (Acrobasis vaccinii); Cross-striped Cabbageworm (Evergestis rimosalis); Cutworm (Noctuid species, Agrotis ipsilon); Douglas Fir Tussock Moth (Orgyia pseudotsugata); Ello Moth (Hornworm) (Erinnyis ello); Elm Spanworm (Ennomos subsignaria); European Grapevine Moth (Lobesia botrana); European Skipper (Thymelicus lineola (Essex Skipper); Fall Webworm (Melissopus latiferreanus; Filbert Leafroller (Archips rosanus; Fruittree Leafroller (Archips argyrospilia; Grape Berry Moth (Paralobesia viteana; Grape Leafroller (Platynota stultana; Grapeleaf Skeletonizer (Harrisina americana (ground only); Green Cloverworm (Plathypena scabra; Greenstriped Mapleworm (Dryocampa rubicunda; Gummosos-Batrachedra; Comosae (Hodges); Gypsy Moth (Lymantria dispar); Hemlock Looper (Lambdina fiscellaria); Hornworm (Manduca spp.); Imported Cabbageworm (Pieris rapae); Io Moth (Automeris io); Jack Pine Budworm (Choristoneura pinus); Light Brown Apple Moth (Epiphyas postvittana); Melonworm (Diaphania hyalinata); Mimosa Webworm (Homadaula anisocentra); Obliquebanded Leafroller (Choristoneura rosaceana); Oleander Moth (Syntomeida epilais); Omnivorous Leafroller (Playnota stultana); Omnivorous Looper (Sabulodes aegrotata); Orangedog (Papilio cresphontes); Orange Tortrix (Argyrotaenia citrana); Oriental Fruit Moth (Grapholita molesta); Peach Twig Borer (Anarsia lineatella); Pine Butterfly (Neophasia menapia); Podworm (Heliocoverpa zea); Redbanded Leafroller (Argyrotaenia velutinana); Redhumped Caterpillar (Schizura concinna); Rindworm Complex (Various Leps.); Saddleback Caterpillar (Sibine stimulea); Saddle Prominent Caterpillar Heterocampa guttivitta); Saltmarsh Caterpillar (Estigmene acrea); Sod Webworm (Crambus spp.); Spanworm (Ennomos subs/gnaria); Fall Cankerworm (Alsophila pometaria); Spruce Budworm (Choristoneura fumiferana); Tent Caterpillar (Various Lasiocampidae); Thecla-Thecla Basilides (Geyr) Thecla basilides); Tobacco Hornworm (Manduca sexta); Tobacco Moth (Ephestia elutella); Tufted Apple Budmoth (Platynota idaeusalis); Twig Borer (Anarsia lineatella); Variegated Cutworm (Peridroma saucia); Variegated Leafroller (Platynota flavedana); Velvetbean Caterpillar (Anticarsia gemmatalis); Walnut Caterpillar (Datana integerrima); Webworm (Hyphantria cunea); Western Tussock Moth (Orgyia vetusta); Southern Cornstalk Borer (Diatraea crambidoides); Corn Earworm; Sweet potato weevil; Pepper weevil; Citrus root weevil; Strawberry root weevil; Pecan weevil; Filbert weevil; Ricewater weevil; Alfalfa weevil; Clover weevil; Tea shot-hole borer; Root weevil; Sugarcane beetle; Coffee berry borer; Annual blue grass weevil (Listronotus maculicollis); Asiatic garden beetle (Maladera castanea); European chafer (Rhizotroqus majalis); Green June beetle (Cotinis nitida); Japanese beetle (Popillia japonica); May or June beetle (Phyllophaga sp.); Northern masked chafer (Cyclocephala borealis); Oriental beetle (Anomala orientalis); Southern masked chafer (Cyclocephala lurida); Billbug (Curculionoidea); Aedes aegypti; Busseola fusca; Chilo suppressalis; Culex pipiens; Culex quinquefasciatus; Diabrotica virgifera; Diatraea saccharalis; Helicoverpa armigera; Helicoverpa zea; Heliothis virescens; Leptinotarsa decemlineata; Ostrinia furnacalis; Ostrinia nubilalis; Pectinophora gossypiella; Plodia interpunctella; Plutella xylostella; Pseudoplusia includens; Spodoptera exigua; Spodoptera frugiperda; Spodoptera littoralis; Trichoplusia ni; and Xanthogaleruca luteola.

[1519] In some embodiments, the present invention provides a method of protecting a plant from insects comprising, providing a plant which expresses one or more CRIPs, or polynucleotides encoding the same; and one or more peptide-IAs.

[1520] In some embodiments, the present invention provides a method of protecting a plant from insects comprising, providing a plant which expresses one or more CRIPs, or polynucleotides encoding the same; and application of one or more non-peptide-IAs to said plant.

[1521] In some embodiments, the present invention provides a method of combating, controlling, or inhibiting a pest comprising, applying a pesticidally effective amount of a composition comprising (1) one or more CRIPs, or pharmaceutically acceptable salts thereof; one or more CRIP-insecticidal proteins, or pharmaceutically acceptable salts thereof; or a combination thereof; (2) one or more Insecticidal Agents (IA), as described herein; and (3) one or more excipients; wherein the composition is applied to the locus of the pest, or to a plant or animal susceptible to an attack by the pest.

[1522] Any of the compositions described herein can be used in the method of combating, controlling, or inhibiting a pest comprising, applying a pesticidally effective amount of a composition comprising (1) one or more CRIPs, or pharmaceutically acceptable salts thereof; one or more CRIP-insecticidal proteins, or pharmaceutically acceptable salts thereof; or a combination thereof; (2) one or more Insecticidal Agents (IA), as described herein; and (3) one or more excipients.

[1523] For example, in some embodiments, the present invention provides a method of combating, controlling, or inhibiting a pest comprising, applying a pesticidally effective amount of a composition comprising: (1) one or more CRIPs, or pharmaceutically acceptable salt thereof; CRIP-insecticidal proteins, or pharmaceutically acceptable salt thereof; or combination thereof; and (2) one or more Insecticidal Agents (IA), as described herein; wherein the CRIP is selected from Table A, i.e., A1; A2; A3; A4; A5; A6; A7; A8; A9; A10; A11; A12; A13; A14; A15; A16; A17; A18; A19; A20; A21; A22; A23; A24; A25; A26; A27; A28; A29; A30; A31; A32; A33; A34; A35; A36; A37; A38; A39; A40; A41; A42; A43; A44; A45; A46; A47; A48; A49; A50; A51; A52; A53; A54; A55; A56; A57; A58; A59; A60; A61; A62; A63; A64; A65; A66; A67; or A68; wherein said CRIP is at least 50% identical, at least 55% identical, at least 60% identical, at least 65% identical, at least 70% identical, at least 75% identical, at least 80% identical, at least 81% identical, at least 82% identical, at least 83% identical, at least 84% identical, at least 85% identical, at least 86% identical, at least 87% identical, at least 88% identical, at least 89% identical, at least 90% identical, at least 91% identical, at least 92% identical, at least 93% identical, at least 94% identical, at least 95% identical, at least 96% identical, at least 97% identical, at least 98% identical, at least 99% identical, at least 99.5% identical, at least 99.6% identical, at least 99.7% identical, at least 99.8% identical, at least 99.9% identical, or 100% identical to an amino acid sequences set forth in 1; 2; 3; 4; 5; 6; 7; 8; 9; 10; 11; 12; 13; 14; 15; 49; 50; 51;

[1524] 52; 53; 621; 622; 623; 624; 625; 626; 627; 628; 629; 630; 631; 632; 633; 634; 635; 636; 637; 638; 639; 640; 641; 642; 643; 644; 645; 646; 647; 648; 649; 650; 651; 652; 653; 654; 66; 88; 588; 44; 45; 46; 47; 60; 61; 62; 63; 64; 594; or 65, respectively.

[1525] In some embodiments, the present invention provides a method of combating, controlling, or inhibiting a pest comprising, applying a pesticidally effective amount of a composition comprising: (1) one or more CRIPs, or pharmaceutically acceptable salt thereof; CRIP-insecticidal proteins, or pharmaceutically acceptable salt thereof; or combination thereof; and (2) one or more Insecticidal Agents (IA), as described herein; wherein the CRIP peptide may comprise, consist essentially of, or consist of, a peptide having an amino acid sequence that is at least 50% identical, at least 55% identical, at least 60% identical, at least 65% identical, at least 70% identical, at least 75% identical, at least 80% identical, at least 81% identical, at least 82% identical, at least 83% identical, at least 84% identical, at least 85% identical, at least 86% identical, at least 87% identical, at least 88% identical, at least 89% identical, at least 90% identical, at least 91% identical, at least 92% identical, at least 93% identical, at least 94% identical, at least 95% identical, at least 96% identical, at least 97% identical, at least 98% identical, at least 99% identical, at least 99.5% identical, at least 99.6% identical, at least 99.7% identical, at least 99.8% identical, at least 99.9% identical, or 100% identical to: a spider peptide having an amino acid sequence as set forth in any one of SEQ ID NOs: 192-370; an ACTX peptide (e.g., U-ACTX-Hv1a, U+2-ACTX-Hv1a, rU-ACTX-Hv1a, rU-ACTX-Hv1b, κ-ACTX-Hv1a, κ+2-ACTX-Hv1a, ω-ACTX-Hv1a, and/or ω+2-ACTX-Hv1a) having an amino acid sequence as set forth in any one of SEQ ID NOs: 60-64, 192-370 and 594; an Γ-CNTX-Pn1a having an amino acid sequence as set forth in any one of SEQ ID NO: 65; a U1-agatoxin-Ta1b peptide having an amino acid sequence as set forth in SEQ ID NO: 1; a U1-agatoxin-Ta1b Variant Polypeptide (TVP) having an amino acid sequence as set forth in any one of SEQ ID NOs: 2-15, 49-53, 2-15, 49-53, 621-622, 624-628, 631-640, 642-651, or 653-654; a scorpion peptide having an amino acid sequence as set forth in any one of SEQ ID NOs: 66, 88-191; a sea anemone peptide having an amino acid sequence as set forth in any one of SEQ ID NOs: 371-411; an Av3 polypeptide from Anemonia viridis having an amino acid sequence as set forth in SEQ ID NO:44; an Av3 variant polypeptide (AVP) having an amino acid sequence as set forth in any one of SEQ ID NOs: 45-47; or a conotoxin; and wherein the IA is an IA listed in Table B, and wherein the IA is B1; B2; B3; B4; B5; B6; B7; B8; B9; B10; B11; B12; B13; B14; B15; B16; B17; B18; B19; B20; B21; B22; B23; B24; B25; B26; B27; B28; B29; B30; B31; B32; B33; B34; B35; B36; B37; B38; B39; B40; B41; B42; B43; B44; B45; B46; B47; B48; B49; B50; B51; B52; B53; B54; B55; B56; B57; B58; B59; B60; B61; B62; B63; B64; B65; B66; B67; B68; B69; B70; B71; B72; B73; B74; B75; B76; B77; B78; B79; B80; B81; B82; B83; B84; B85; B86; B87; B88; B89; B90; B91; B92; B93; B94; B95; B96; B97; B98; B99; B100; B101; B102; B103; B104; B105; B106; B107; B108; B109; B110; B111; B112; B113; B114; B115; B116; B117; B118; B119; B120; B121; B122; B123; B124; B125; B126; B127; B128; B129; B130; B131; B132; B133; B134; B135; B136; B137; B138; B139; B140; B141; B142; B143; B144; B145; B146; B147; B148; B149; B150; B151; B152; B153; B154; B155; B156; B157; B158; B159; B160; B161; B162; B163; B164; B165; B166; B167; B168; B169; B170; B171; B172; B173; B174; B175; B176; B177; B178; B179; B180; B181; B182; B183; B184; B185; B186; B187; B188; B189; B190; B191; B192; B193; B194; B195; B196; B197; B198; B199; B200; B201; B202; B203; B204; B205; B206; B207; B208; B209; B210; B211; B212; B213; B214; B215; B216; B217; B218; B219; B220; B221; B222; B223; B224; B225; B226; B227; B228; B229; B230; B231; B232; B233; B234; B235; B236; B237; B238; B239; B240; B241; B242; B243; B244; B245; B246; B247; B248; B249; B250; B251; B252; B253; B254; B255; B256; B257; B258; B259; B260; B261; B262; B263; B264; B265; B266; B267; B268; B269; B270; B271; B272; B273; B274; B275; B276; B277; B278; B279; B280; B281; B282; B283; B284; B285; B286; B287; B288; B289; B290; B291; B292; B293; B294; B295; B296; B297; B298; B299; B300; B301; B302; B303; B304; B305; B306; B307; B308; B309; B310; B311; B312; B313; B314; B315; B316; B317; B318; B319; B320; B321; B322; B323; B324; B325; B326; B327; B328; B329; B330; B331; B332; B333; B334; B335; B336; B337; B338; B339; B340; B341; B342; B343; B344; B345; B346; B347; B348; B349; B350; B351; B352; B353; B354; B355; B356; B357; B358; B359; B360; B361; B362; B363; B364; B365; B366; B367; B368; B369; B370; B371; B372; B373; B374; B375; B376; B377; B378; B379; B380; B381; B382; B383; B384; B385; B386; B387; B388; B389; B390; B391; B392; B393; B394; B395; B396; B397; B398; B399; B400; B401; B402; B403; B404; B405; B406; B407; B408; B409; B410; B411; B412; B413; B414; B415; B416; B417; B418; B419; B420; B421; B422; B423; B424; B425; B426; B427; B428; B429; B430; B431; B432; B433; B434; B435; B436; B437; B438; B439; B440; B441; B442; B443; B444; B445; B446; B447; B448; B449; B450; B451; B452; B453; B454; B455; B456; B457; B458; B459; B460; B461; B462; B463; B464; B465; B466; B467; B468; B469; B470; B471; B472; B473; B474; B475; B476; B477; B478; B479; or a combination thereof.

[1526] Method of Using TVP Compositions (Formula I)

[1527] In some embodiments, the present invention provides a method of combating, controlling, or inhibiting a pest comprising, applying a pesticidally effective amount of a composition comprising (1) a combination of an Insecticidal Agent (IA) and a CRIP; wherein the IA is an IA set forth in Table B, i.e., any one or more of B1-B479; and wherein the CRIP is a TVP, a TVP-insecticidal protein, or a combination thereof; and (2) one or more excipients.

[1528] In some embodiments, the present invention provides a method of combating, controlling, or inhibiting a pest comprising, applying a pesticidally effective amount of a composition comprising (1) a combination of an Insecticidal Agent (IA) and a CRIP; wherein the IA is an IA set forth in Table B, i.e., any one or more of B1-B479; and wherein the CRIP is a TVP, a TVP-insecticidal protein, or a combination thereof; and (2) one or more excipients, wherein the one or more excipients is selected from the group consisting of: trehalose; maltodextrin; potassium phosphate dibasic anhydrous (K₂HPO₄); potassium phosphate monobasic (KH₂PO₄); BIT; and fermentation solids.

[1529] In some embodiments, the present invention provides a method of combating, controlling, or inhibiting a pest comprising, applying a pesticidally effective amount of a composition comprising (1) a combination of an Insecticidal Agent (IA) and a CRIP; wherein the IA is an IA set forth in Table B, i.e., any one or more of B1-B479; and wherein the CRIP is a TVP, a TVP-insecticidal protein, or a combination thereof; and (2) one or more excipients; wherein the TVP or TVP-insecticidal protein ranges from about 2% to about 16% wt/wt; and wherein trehalose ranges from about 5% to about 40% wt/wt; BIT ranges from about 0.01% to about 0.1% wt/wt; maltodextrin ranges from about 10% to about 50% wt/wt; potassium phosphate dibasic anhydrous (K₂HPO₄) ranges from about 1% to about 5% wt/wt; and potassium phosphate monobasic (KH₂PO₄) ranges from about 0.10% to about 1% wt/wt; and fermentation solids range from about 15% to about 40% wt/wt; of the total weight of the composition.

[1530] In some embodiments, the present invention provides a method of combating, controlling, or inhibiting a pest comprising, applying a pesticidally effective amount of a composition comprising (1) a combination of an Insecticidal Agent (IA) and a CRIP; wherein the IA is an IA set forth in Table B, i.e., any one or more of B1-B479; and wherein the CRIP is a TVP, a TVP-insecticidal protein, or a combination thereof; and (2) one or more excipients; wherein the TVP or TVP-insecticidal protein ranges from about 7% to about 9% wt/wt; and wherein trehalose ranges from about 20% to about 30% wt/wt; BIT ranges from about 0.025% to about 0.075% wt/wt; maltodextrin ranges from about 30% to about 40% wt/wt; potassium phosphate dibasic anhydrous (K₂HPO₄) ranges from about 2% to about 3% wt/wt; potassium phosphate monobasic (KH₂PO₄) ranges from about 0.2% to about 0.6%; and fermentation solids range from about 20% to about 30%, of the total weight of the composition.

[1531] In some embodiments, the present invention provides a method of combating, controlling, or inhibiting a pest comprising, applying a pesticidally effective amount of a composition comprising (1) a combination of an Insecticidal Agent (IA) and a CRIP; wherein the IA is an IA set forth in Table B, i.e., any one or more of B1-B479; and wherein the CRIP is a TVP, a TVP-insecticidal protein, or a combination thereof; and (2) one or more excipients; wherein the TVP or TVP-insecticidal protein is about 8.5% wt/wt; and wherein trehalose is about 25% wt/wt; BIT is about 0.05% wt/wt; maltodextrin is about 36.3% wt/wt; potassium phosphate dibasic anhydrous (K₂HPO₄) is about 2.6% wt/wt; potassium phosphate monobasic (KH₂PO₄) is about 0.4% wt/wt; and fermentation solids are about 26.85% wt/wt, of the total weight of the composition.

[1532] In some embodiments, the present invention provides a method of combating, controlling, or inhibiting a pest comprising, applying a pesticidally effective amount of a composition consisting essentially of (1) a combination of an Insecticidal Agent (IA) and a CRIP; wherein the IA is an IA set forth in Table B, i.e., any one or more of B1-B479; and wherein the CRIP is a TVP or TVP-insecticidal protein; and wherein the composition consists essentially of the following: an amount of a TVP or a TVP-insecticidal protein that is 8.5% wt/wt; an amount of trehalose that is 25% wt/wt; an amount of BIT that is 0.05% wt/wt; an amount of maltodextrin that is 36.3% wt/wt; an amount of potassium phosphate dibasic anhydrous (K₂HPO₄) that is 2.6% wt/wt; an amount of potassium phosphate monobasic (KH₂PO₄) that is 0.4% wt/wt; and an amount of fermentation solids that is 26.85% wt/wt, of the total weight of the composition.

[1533] In some embodiments, the present invention provides a method of combating, controlling, or inhibiting a pest comprising, applying a pesticidally effective amount of a composition comprising a combination of an Insecticidal Agent (IA) and a CRIP; wherein the IA is an IA set forth in Table B, i.e., any one or more of B1-B479; and wherein the CRIP is a TVP or a TVP-insecticidal protein; and wherein the composition has the following amounts: an amount of a TVP or a TVP-insecticidal protein that is 8.5% wt/wt; an amount of trehalose that is 25% wt/wt; an amount of BIT that is 0.05% wt/wt; an amount of maltodextrin that is 36.3% wt/wt; an amount of potassium phosphate dibasic anhydrous (K₂HPO₄) that is 2.6% wt/wt; an amount of potassium phosphate monobasic (KH₂PO₄) that is 0.4% wt/wt; and an amount of fermentation solids that is 26.85% wt/wt, of the total weight of the composition.

[1534] In some embodiments, the present invention provides a method of combating, controlling, or inhibiting a pest comprising, applying a pesticidally effective amount of a composition comprising (1) a combination of an Insecticidal Agent (IA) and a CRIP; wherein the IA is an IA set forth in Table B, i.e., any one or more of B1-B479; and wherein the CRIP is a TVP, a TVP-insecticidal protein, or a combination thereof and (2) a plurality of excipients; wherein the TVP or TVP-insecticidal protein comprises an amino acid sequence that is at least 90% identical to the amino acid sequence according to Formula (I): E-P-D-E-I-C-R-X₁-X₂-M-X₃-N-K-E-F-T-Y-X₄-S-N-V-C-N-N-C-G-D-Q-V-A-A-C-E-A-E-C-F-X₅-N-D-V-Y-Z₁-A-C-H-E-A-Q-X₆-X₇, wherein the polypeptide comprises at least one amino acid substitution relative to the wild-type sequence of U1-agatoxin-Ta1b as set forth in SEQ ID NO:1, and wherein X₁ is A, S, or N; X₂ is R, Q, N, A, G, N, L, D, V, M, I, C, E, T, or S; X₃ is T or P; X₄ is K or A; X₅ is R or A; Z₁ is T, S, A, F, P, Y, K, W, H, A, G, N, L, V, M, I, Q, C, E, or R; X₆ is K or absent; and X₇ is G or absent; or a pharmaceutically acceptable salt thereof wherein the composition consists of an amount of TVP that is 8.5% wt/wt of the total weight of the composition; and wherein the plurality of excipients consists of the following: an amount of trehalose that is 25% wt/wt; an amount of BIT that is 0.05% wt/wt; an amount of maltodextrin that is 36.3% wt/wt; an amount of potassium phosphate dibasic anhydrous (K₂HPO₄) that is 2.6% wt/wt; an amount of potassium phosphate monobasic (KH₂PO₄) that is 0.4% wt/wt; and an amount of fermentation solids that is 26.85% wt/wt, of the total weight of the composition.

[1535] In some embodiments, the present invention provides a method of combating, controlling, or inhibiting a pest comprising, applying a pesticidally effective amount of a composition comprising (1) a combination of an Insecticidal Agent (IA) and a CRIP; wherein the IA is an IA set forth in Table B, i.e., any one or more of B1-B479; and wherein the CRIP is a TVP, a TVP-insecticidal protein, or a combination thereof and (2) a plurality of excipients; wherein the TVP or TVP-insecticidal protein; wherein the TVP has one amino acid substitution at X₁, X₂, X₃, X₄, or X₅, or a pharmaceutically acceptable salt thereof.

[1536] In some embodiments, the present invention provides a method of combating, controlling, or inhibiting a pest comprising, applying a pesticidally effective amount of a composition comprising (1) a combination of an Insecticidal Agent (IA) and a CRIP; wherein the IA is an IA set forth in Table B, i.e., any one or more of B1-B479; and wherein the CRIP is a TVP, a TVP-insecticidal protein, or a combination thereof and (2) a plurality of excipients; wherein the TVP or TVP-insecticidal protein; wherein the TVP has one amino acid substitution at X₁, X₂, X₃, X₄, or X₅; and wherein X₇ is Glycine, or a pharmaceutically acceptable salt thereof.

[1537] In some embodiments, the present invention provides a method of combating, controlling, or inhibiting a pest comprising, applying a pesticidally effective amount of a composition comprising (1) a combination of an Insecticidal Agent (IA) and a CRIP; wherein the IA is an IA set forth in Table B, i.e., any one or more of B1-B479; and wherein the CRIP is a TVP, a TVP-insecticidal protein, or a combination thereof; and (2) a plurality of excipients; wherein the TVP or TVP-insecticidal protein; wherein the TVP has one amino acid substitution at X₁, X₂, X₃, X₄, or X₅; and wherein X₇ is absent, or a pharmaceutically acceptable salt thereof.

[1538] In some embodiments, the present invention provides a method of combating, controlling, or inhibiting a pest comprising, applying a pesticidally effective amount of a composition comprising (1) a combination of an Insecticidal Agent (IA) and a CRIP; wherein the IA is an IA set forth in Table B, i.e., any one or more of B1-B479; and wherein the CRIP is a TVP, a TVP-insecticidal protein, or a combination thereof; and (2) a plurality of excipients; wherein the TVP or TVP-insecticidal protein; wherein the TVP has one amino acid substitution at X₁, X₂, X₃, X₄, or X₅; and wherein X₆ and X₇ are absent, or a pharmaceutically acceptable salt thereof.

[1539] In some embodiments, the present invention provides a method of combating, controlling, or inhibiting a pest comprising, applying a pesticidally effective amount of a composition comprising (1) a combination of an Insecticidal Agent (IA) and a CRIP; wherein the IA is an IA set forth in Table B, i.e., any one or more of B1-B479; and wherein the CRIP is a TVP, a TVP-insecticidal protein, or a combination thereof and (2) a plurality of excipients; wherein the TVP or TVP-insecticidal protein; wherein the TVP comprises an amino sequence as set forth in any one of SEQ ID NOs: 2-15, 49-53, 2-15, 49-53, 621-622, 624-628, 631-640, 642-651, or 653-654.

[1540] In some embodiments, the present invention provides a method of combating, controlling, or inhibiting a pest comprising, applying a pesticidally effective amount of a composition consisting of (1) a TVP, a TVP-insecticidal protein, or a combination thereof; and (2) a plurality of excipients; wherein the TVP or TVP-insecticidal protein; wherein the TVP is encoded by a polynucleotide sequence as set forth in any one of SEQ ID NOs: 17-30, 54-58, or 655-688, or a complementary nucleotide sequence thereof.

[1541] In some embodiments, the present invention provides a method of combating, controlling, or inhibiting a pest comprising, applying a pesticidally effective amount of a composition comprising (1) a combination of an Insecticidal Agent (IA) and a CRIP; wherein the IA is an IA set forth in Table B, i.e., any one or more of B1-B479; and wherein the CRIP is a TVP, a TVP-insecticidal protein, or a combination thereof; and (2) a plurality of excipients; wherein the TVP or TVP-insecticidal protein; wherein the TVP further comprises a homopolymer or heteropolymer of two or more TVPs, wherein the amino acid sequence of each TVP is the same or different.

[1542] In some embodiments, the present invention provides a method of combating, controlling, or inhibiting a pest comprising, applying a pesticidally effective amount of a composition comprising (1) a combination of an Insecticidal Agent (IA) and a CRIP; wherein the IA is an IA set forth in Table B, i.e., any one or more of B1-B479; and wherein the CRIP is a TVP, a TVP-insecticidal protein, or a combination thereof; and (2) a plurality of excipients; wherein the TVP or TVP-insecticidal protein; wherein the TVP is a fused protein comprising two or more TVPs separated by a cleavable or non-cleavable linker, and wherein the amino acid sequence of each TVP may be the same or different.

[1543] In some embodiments, the present invention provides a method of combating, controlling, or inhibiting a pest comprising, applying a pesticidally effective amount of a composition comprising (1) a combination of an Insecticidal Agent (IA) and a CRIP; wherein the IA is an IA set forth in Table B, i.e., any one or more of B1-B479; and wherein the CRIP is a TVP, a TVP-insecticidal protein, or a combination thereof; and (2) a plurality of excipients; wherein the TVP or TVP-insecticidal protein; wherein the linker is a cleavable linker.

[1544] In some embodiments, the present invention provides a method of combating, controlling, or inhibiting a pest comprising, applying a pesticidally effective amount of a composition comprising (1) a combination of an Insecticidal Agent (IA) and a CRIP; wherein the IA is an IA set forth in Table B, i.e., any one or more of B1-B479; and wherein the CRIP is a TVP, a TVP-insecticidal protein, or a combination thereof; and (2) a plurality of excipients; wherein the TVP or TVP-insecticidal protein; wherein the cleavable linker is cleavable inside the gut or hemolymph of an insect.

[1545] In some embodiments, the present invention provides a method of combating, controlling, or inhibiting a pest comprising, applying a pesticidally effective amount of a composition comprising (1) a combination of an Insecticidal Agent (IA) and a CRIP; wherein the IA is an IA set forth in Table B, i.e., any one or more of B1-B479; and wherein the CRIP is a TVP, a TVP-insecticidal protein, or a combination thereof; and (2) a plurality of excipients; wherein the TVP or TVP-insecticidal protein comprises an amino acid sequence that is at least 90% identical to the amino acid sequence according to Formula (I): E-P-D-E-I-C-R-X₁-X₂-M-X₃-N-K-E-F-T-Y-X₄-S-N-V-C-N-N-C-G-D-Q-V-A-A-C-E-A-E-C-F-X₅-N-D-V-Y-Z₁-A-C-H-E-A-Q-X₆-X₇, wherein the polypeptide comprises at least one amino acid substitution relative to the wild-type sequence of U1-agatoxin-Ta1b as set forth in SEQ ID NO:1, and wherein X₁ is A, S, or N; X₂ is R, Q, N, A, G, N, L, D, V, M, I, C, E, T, or S; X₃ is T or P; X₄ is K or A; X₅ is R or A; Z₁ is T, S, A, F, P, Y, K, W, H, A, G, N, L, V, M, I, Q, C, E, or R; X₆ is K or absent; and X₇ is G or absent; or a pharmaceutically acceptable salt thereof; wherein the composition consists of an amount of TVP that is 8.5% wt/wt of the total weight of the composition; and wherein the plurality of excipients consists of the following: an amount of trehalose that is 25% wt/wt; an amount of BIT that is 0.05% wt/wt; an amount of maltodextrin that is 36.3% wt/wt; an amount of potassium phosphate dibasic anhydrous (K₂HPO₄) that is 2.6% wt/wt; an amount of potassium phosphate monobasic (KH₂PO₄) that is 0.4% wt/wt; and an amount of fermentation solids that is 26.85% wt/wt, of the total weight of the composition; wherein if Z₁ is T or S, then the TVP is glycosylated.

[1546] Any of the foregoing TVPs, TVP-insecticidal proteins, or pharmaceutically acceptable salts thereof, can be used in the any of the formulations described herein and below, e.g., any of the foregoing TVPs, TVP-insecticidal proteins, or pharmaceutically acceptable salts thereof, can be used in the formulation of: a wettable powder or granule formulation; or a liquid concentrate formulation.

[1547] In some embodiments, the present invention provides a method of combating, controlling, or inhibiting a pest comprising, applying a pesticidally effective amount of a composition comprising (1) a combination of an Insecticidal Agent (IA) and a CRIP; wherein the IA is an IA set forth in Table B, i.e., any one or more of B1-B479; and wherein the CRIP is a TVP or a TVP-insecticidal protein; and (2) an excipient; to the locus of a pest, wherein the pest is selected from the group consisting of: Achema Sphinx Moth (Hornworm) (Eumorpha achemon); Alfalfa Caterpillar (Colias eurytheme); Almond Moth (Caudra cautella); Amorbia Moth (Amorbia humerosana); Armyworm (Spodoptera spp., e.g. exigua, frugiperda, littoralis, Pseudaletia unipuncta); Artichoke Plume Moth (Platyptilia carduidactyla); Azalea Caterpillar (Datana major); Bagworm (Thyridopteryx); ephemeraeformis); Banana Moth (Hypercompe scribonia); Banana Skipper (Erionota thrax); Blackheaded Budworm (Acleris gloverana); California Oakworm (Phryganidia californica); Spring Cankerworm (Paleacrita merriccata); Cherry Fruitworm (Grapholita packardi); China Mark Moth (Nymphula stagnata); Citrus Cutworm (Xylomyges curialis); Codling Moth (Cydia pomonella); Cranberry Fruitworm (Acrobasis vaccinii); Cross-striped Cabbageworm (Evergestis rimosalis); Cutworm (Noctuid species, Agrotis ipsilon); Douglas Fir Tussock Moth (Orgyia pseudotsugata); Ello Moth (Hornworm) (Erinnyis ello); Elm Spanworm (Ennomos subsignaria); European Grapevine Moth (Lobesia botrana); European Skipper (Thymelicus lineola (Essex Skipper); Fall Webworm (Melissopus latiferreanus; Filbert Leafroller (Archips rosanus; Fruittree Leafroller (Archips argyrospilia; Grape Berry Moth (Paralobesia viteana; Grape Leafroller (Platynota stultana; Grapeleaf Skeletonizer (Harrisina americana (ground only); Green Cloverworm (Plathypena scabra; Greenstriped Mapleworm (Dryocampa rubicunda; Gummosos-Batrachedra; Comosae (Hodges); Gypsy Moth (Lymantria dispar); Hemlock Looper (Lambdina fiscellaria); Hornworm (Manduca spp.); Imported Cabbageworm (Pieris rapae); Io Moth (Automeris io); Jack Pine Budworm (Choristoneura pinus); Light Brown Apple Moth (Epiphyas postvittana); Melonworm (Diaphania hyalinata); Mimosa Webworm (Homadaula anisocentra); Obliquebanded Leafroller (Choristoneura rosaceana); Oleander Moth (Syntomeida epilais); Omnivorous Leafroller (Playnota stultana); Omnivorous Looper (Sabulodes aegrotata); Orangedog (Papilio cresphontes); Orange Tortrix (Argyrotaenia citrana); Oriental Fruit Moth (Grapholita molesta); Peach Twig Borer (Anarsia lineatella); Pine Butterfly (Neophasia menapia); Podworm (Heliocoverpa zea); Redbanded Leafroller (Argyrotaenia velutinana); Redhumped Caterpillar (Schizura concinna); Rindworm Complex (Various Leps.); Saddleback Caterpillar (Sibine stimulea); Saddle Prominent Caterpillar Heterocampa guttivitta); Saltmarsh Caterpillar (Estigmene acrea); Sod Webworm (Crambus spp.); Spanworm (Ennomos subsignaria); Fall Cankerworm (Alsophila pometaria); Spruce Budworm (Choristoneura fumiferana); Tent Caterpillar (Various Lasiocampidae); Thecla-Thecla Basilides (Geyr) Thecla basilides); Tobacco Hornworm (Manduca sexta); Tobacco Moth (Ephestia elutella); Tufted Apple Budmoth (Platynota idaeusalis); Twig Borer (Anarsia lineatella); Variegated Cutworm (Peridroma saucia); Variegated Leafroller (Platynota flavedana); Velvetbean Caterpillar (Anticarsia gemmatalis); Walnut Caterpillar (Datana integerrima); Webworm (Hyphantria cunea); Western Tussock Moth (Orgyia vetusta); Southern Cornstalk Borer (Diatraea crambidoides); Corn Earworm; Sweet potato weevil; Pepper weevil; Citrus root weevil; Strawberry root weevil; Pecan weevil; Filbert weevil; Ricewater weevil; Alfalfa weevil; Clover weevil; Tea shot-hole borer; Root weevil; Sugarcane beetle; Coffee berry borer; Annual blue grass weevil (Listronotus maculicollis); Asiatic garden beetle (Maladera castanea); European chafer (Rhizotroqus majalis); Green June beetle (Cotinis nitida); Japanese beetle (Popillia japonica); May or June beetle (Phyllophaga sp.); Northern masked chafer (Cyclocephala borealis); Oriental beetle (Anomala orientalis); Southern masked chafer (Cyclocephala lurida); Billbug (Curcuhonoidea); Aedes aegypti; Busseola fusca; Chilo suppressalis; Culex pipiens; Culex quinquefasciatus; Diabrotica virgifera; Diatraea saccharalis; Helicoverpa armigera; Helicoverpa zea; Heliothis virescens; Leptinotarsa decemlineata; Ostrinia furnacalis; Ostrinia nubilalis; Pectinophora gossypiella; Plodia interpunctella; Plutella xylostella; Pseudoplusia includens; Spodoptera exigua; Spodoptera frugiperda; Spodoptera littoralis; Trichoplusia ni; and Xanthogaleruca luteola.

[1548] Method of Using TVP Compositions (Formula II)

[1549] In some embodiments, the present invention provides a method of combating, controlling, or inhibiting a pest comprising, applying a pesticidally effective amount of a composition comprising (1) a combination of an Insecticidal Agent (IA) and a CRIP; wherein the IA is an IA set forth in Table B, i.e., any one or more of B1-B479; and wherein the CRIP is a TVP or a TVP-insecticidal protein; and (2) an excipient; wherein the TVP is selected from one or any combination of the TVPs described herein, e.g., an insecticidal U₁-agatoxin-Ta1b variant polypeptide (TVP), said TVP comprising an amino acid sequence that is at least 90% identical to the amino acid sequence according to Formula (II): E-P-D-E-I-C-R-A-X₁-M-T-N-K-E-F-T-Y-K-S-N-V-C-N-N-C-G-D-O-V-A-A-C-E-A-E-C-F-R-N-D-V-Y-Z₁-A-C-H-E-A-Q-K-G; wherein the polypeptide comprises at least one amino acid substitution relative to the wild-type sequence of U1-agatoxin-Ta1b as set forth in SEQ ID NO:1, and wherein X₁ is R or Q; and Z₁ is T or A; and wherein the composition is applied to the locus of the pest, or to a plant or animal susceptible to an attack by the pest.

[1550] Any of the compositions described herein can be used in the method of method of combating, controlling, or inhibiting a pest comprising, applying a pesticidally effective amount of a composition comprising (1) a combination of an Insecticidal Agent (IA) and a CRIP; wherein the IA is an IA set forth in Table B, i.e., any one or more of B1-B479; and wherein the CRIP is a TVP or a TVP-insecticidal protein; and (2) an excipient.

[1551] For example, in some embodiments, the present invention provides a method of combating, controlling, or inhibiting a pest comprising, applying a pesticidally effective amount of a composition comprising (1) a combination of an Insecticidal Agent (IA) and a CRIP; wherein the IA is an IA set forth in Table B, i.e., any one or more of B1-B479; and wherein the CRIP is a TVP, and one or more excipients; wherein the TVP comprises an amino acid sequence that is at least 50% identical, at least 55% identical, at least 60% identical, at least 65% identical, at least 70% identical, at least 75% identical, at least 80% identical, at least 81% identical, at least 82% identical, at least 83% identical, at least 84% identical, at least 85% identical, at least 86% identical, at least 87% identical, at least 88% identical, at least 89% identical, at least 90% identical, at least 91% identical, at least 92% identical, at least 93% identical, at least 94% identical, at least 95% identical, at least 96% identical, at least 97% identical, at least 98% identical, at least 99% identical, at least 99.5% identical, at least 99.6% identical, at least 99.7% identical, at least 99.8% identical, at least 99.9% identical, or 100% identical to the amino acid sequence according to Formula (II): E-P-D-E-I-C-R-A-X₁-M-T-N-K-E-F-T-Y-K-S-N-V-C-N-N-C-G-D-Q-V-A-A-C-E-A-E-C-F-R-N-D-V-Y-Z₁-A-C-H-E-A-Q-K-G; wherein the polypeptide comprises at least one amino acid substitution relative to the wild-type sequence of U1-agatoxin-Ta1b as set forth in SEQ ID NO:1, and wherein X₁ is R or Q; and Z₁ is T or A; or a pharmaceutically acceptable salt thereof; and wherein the one or more excipients is selected from the group consisting of: trehalose; maltodextrin; maltose; potassium phosphate dibasic (K₂HPO₄); potassium phosphate monobasic (KH₂PO₄); lignosulfonate; gypsum; sorbitol; sodium benzoate; potassium sorbate; EDTA; benzisothiazolinone (BIT); and fermentation solids.

[1552] In some embodiments, the present invention provides a method of combating, controlling, or inhibiting a pest comprising, applying a pesticidally effective amount of a composition comprising a TVP, wherein Z₁ is T and the TVP is glycosylated, or a pharmaceutically acceptable salt thereof.

[1553] In some embodiments, the present invention provides a method of combating, controlling, or inhibiting a pest comprising, applying a pesticidally effective amount of a composition consisting of a TVP, wherein X₁ is Q; and Z₁ is A, or a pharmaceutically acceptable salt thereof.

[1554] In some embodiments, the present invention provides a method of combating, controlling, or inhibiting a pest comprising, applying a pesticidally effective amount of a composition comprising (1) a combination of an Insecticidal Agent (IA) and a CRIP; wherein the IA is an IA set forth in Table B, i.e., any one or more of B1-B479; and wherein the CRIP is a TVP, wherein the TVP comprises an amino sequence that is at least 50% identical, at least 55% identical, at least 60% identical, at least 65% identical, at least 70% identical, at least 75% identical, at least 80% identical, at least 81% identical, at least 82% identical, at least 83% identical, at least 84% identical, at least 85% identical, at least 86% identical, at least 87% identical, at least 88% identical, at least 89% identical, at least 90% identical, at least 91% identical, at least 92% identical, at least 93% identical, at least 94% identical, at least 95% identical, at least 96% identical, at least 97% identical, at least 98% identical, at least 99% identical, at least 99.5% identical, at least 99.6% identical, at least 99.7% identical, at least 99.8% identical, at least 99.9% identical, or 100% identical to any of the amino acid sequences set forth in any one of SEQ ID NOs: 2, 49, or 51.

[1555] In some embodiments, the present invention provides a method of combating, controlling, or inhibiting a pest comprising, applying a pesticidally effective amount of a composition comprising (1) a combination of an Insecticidal Agent (IA) and a CRIP; wherein the IA is an IA set forth in Table B, i.e., any one or more of B1-B479; and wherein the CRIP is a TVP, wherein the TVP is encoded by a polynucleotide sequence as set forth in any one of SEQ ID NOs: 17, 54, or 56, or a complementary nucleotide sequence thereof.

[1556] In some embodiments, the present invention provides a method of combating, controlling, or inhibiting a pest comprising, applying a pesticidally effective amount of a composition comprising (1) a combination of an Insecticidal Agent (IA) and a CRIP; wherein the IA is an IA set forth in Table B, i.e., any one or more of B1-B479; and wherein the CRIP is f a TVP, wherein the TVP further comprises a homopolymer or heteropolymer of two or more TVPs, wherein the amino acid sequence of each TVP is the same or different.

[1557] In some embodiments, the present invention provides a method of combating, controlling, or inhibiting a pest comprising, applying a pesticidally effective amount of a composition comprising (1) a combination of an Insecticidal Agent (IA) and a CRIP; wherein the IA is an IA set forth in Table B, i.e., any one or more of B1-B479; and wherein the CRIP is a TVP, wherein the TVP is a fused protein comprising two or more TVPs separated by a cleavable linker or non-cleavable linker, and wherein the amino acid sequence of each TVP may be the same or different.

[1558] In some embodiments, the present invention provides a method of combating, controlling, or inhibiting a pest comprising, applying a pesticidally effective amount of a composition comprising (1) a combination of an Insecticidal Agent (IA) and a CRIP; wherein the IA is an IA set forth in Table B, i.e., any one or more of B1-B479; and wherein the CRIP is a TVP having a linker, wherein the linker is a cleavable linker.

[1559] In some embodiments, a composition of the present invention comprises a TVP having a cleavable linker, wherein the cleavable linker is cleavable inside the gut or hemolymph of an insect.

[1560] In some embodiments, the present invention provides a method of combating, controlling, or inhibiting a pest comprising, applying a pesticidally effective amount of a composition comprising (1) a combination of an Insecticidal Agent (IA) and a CRIP; wherein the IA is an IA set forth in Table B, i.e., any one or more of B1-B479; and wherein the CRIP is a TVP having a linker.

[1561] In some embodiments, the present invention provides a method of combating, controlling, or inhibiting a pest comprising, applying a pesticidally effective amount of a composition comprising (1) a combination of an Insecticidal Agent (IA) and a CRIP; wherein the IA is an IA set forth in Table B, i.e., any one or more of B1-B479; and wherein the CRIP is a TVP, and one or more excipients; wherein the TVP comprises an amino acid sequence that is at least 50% identical, at least 55% identical, at least 60% identical, at least 65% identical, at least 70% identical, at least 75% identical, at least 80% identical, at least 81% identical, at least 82% identical, at least 83% identical, at least 84% identical, at least 85% identical, at least 86% identical, at least 87% identical, at least 88% identical, at least 89% identical, at least 90% identical, at least 91% identical, at least 92% identical, at least 93% identical, at least 94% identical, at least 95% identical, at least 96% identical, at least 97% identical, at least 98% identical, at least 99% identical, at least 99.5% identical, at least 99.6% identical, at least 99.7% identical, at least 99.8% identical, at least 99.9% identical, or 100% identical to the amino acid sequence according to Formula (II): E-P-D-E-I-C-R-A-X₁-M-T-N-K-E-F-T-Y-K-S-N-V-C-N-N-C-G-D-Q-V-A-A-C-E-A-E-C-F-R-N-D-V-Y-Z₁-A-C-H-E-A-Q-K-G; wherein the polypeptide comprises at least one amino acid substitution relative to the wild-type sequence of U1-agatoxin-Ta1b as set forth in SEQ ID NO:1, and wherein X₁ is R or Q; and Z₁ is T or A; or a pharmaceutically acceptable salt thereof; and wherein the one or more excipients is selected from the group consisting of: trehalose; maltodextrin; maltose; potassium phosphate dibasic (K₂HPO₄); potassium phosphate monobasic (KH₂PO₄); lignosulfonate; gypsum; sorbitol; sodium benzoate; potassium sorbate; EDTA; benzisothiazolinone (BIT); and fermentation solids, wherein if Z₁ is T or S, then the TVP is glycosylated.

[1562] In some embodiments, the present invention provides a method of combating, controlling, or inhibiting a pest comprising, applying a pesticidally effective amount of a composition comprising (1) a combination of an Insecticidal Agent (IA) and a CRIP; wherein the IA is an IA set forth in Table B, i.e., any one or more of B1-B479; and wherein the CRIP is a TVP, a TVP-insecticidal protein, or a combination thereof; and (2) one or more excipients.

[1563] In some embodiments, the present invention provides a method of combating, controlling, or inhibiting a pest comprising, applying a pesticidally effective amount of a composition comprising (1) a combination of an Insecticidal Agent (IA) and a CRIP; wherein the IA is an IA set forth in Table B, i.e., any one or more of B1-B479; and wherein the CRIP is a TVP, a TVP-insecticidal protein, or a combination thereof; and (2) one or more excipients, wherein the one or more excipients is selected from the group consisting of: trehalose; maltodextrin; potassium phosphate dibasic anhydrous (K₂HPO₄); potassium phosphate monobasic (KH₂PO₄); BIT; and fermentation solids.

[1564] In some embodiments, the present invention provides a method of combating, controlling, or inhibiting a pest comprising, applying a pesticidally effective amount of a composition comprising (1) a combination of an Insecticidal Agent (IA) and a CRIP; wherein the IA is an IA set forth in Table B, i.e., any one or more of B1-B479; and wherein the CRIP is a TVP, a TVP-insecticidal protein, or a combination thereof; and (2) one or more excipients; wherein the TVP or TVP-insecticidal protein ranges from about 2% to about 16% wt/wt; and wherein trehalose ranges from about 5% to about 40% wt/wt; BIT ranges from about 0.01% to about 0.1% wt/wt; maltodextrin ranges from about 10% to about 50% wt/wt; potassium phosphate dibasic anhydrous (K₂HPO₄) ranges from about 1% to about 5% wt/wt; and potassium phosphate monobasic (KH₂PO₄) ranges from about 0.10% to about 1% wt/wt; and fermentation solids range from about 15% to about 40% wt/wt; of the total weight of the composition.

[1565] In some embodiments, the present invention provides a method of combating, controlling, or inhibiting a pest comprising, applying a pesticidally effective amount of a composition comprising (1) a combination of an Insecticidal Agent (IA) and a CRIP; wherein the IA is an IA set forth in Table B, i.e., any one or more of B1-B479; and wherein the CRIP is a TVP, a TVP-insecticidal protein, or a combination thereof; and (2) one or more excipients; wherein the TVP or TVP-insecticidal protein ranges from about 7% to about 9% wt/wt; and wherein trehalose ranges from about 20% to about 30% wt/wt; BIT ranges from about 0.025% to about 0.075% wt/wt; maltodextrin ranges from about 30% to about 40% wt/wt; potassium phosphate dibasic anhydrous (K₂HPO₄) ranges from about 2% to about 3% wt/wt; potassium phosphate monobasic (KH₂PO₄) ranges from about 0.2% to about 0.6%; and fermentation solids range from about 20% to about 30%, of the total weight of the composition.

[1566] In some embodiments, the present invention provides a method of combating, controlling, or inhibiting a pest comprising, applying a pesticidally effective amount of a composition comprising (1) a combination of an Insecticidal Agent (IA) and a CRIP; wherein the IA is an IA set forth in Table B, i.e., any one or more of B1-B479; and wherein the CRIP is a TVP, a TVP-insecticidal protein, or a combination thereof; and (2) one or more excipients; wherein the TVP or TVP-insecticidal protein is about 8.5% wt/wt; and wherein trehalose is about 25% wt/wt; BIT is about 0.05% wt/wt; maltodextrin is about 36.3% wt/wt; potassium phosphate dibasic anhydrous (K₂HPO₄) is about 2.6% wt/wt; potassium phosphate monobasic (KH₂PO₄) is about 0.4% wt/wt; and fermentation solids are about 26.85% wt/wt, of the total weight of the composition.

[1567] In some embodiments, the present invention provides a method of combating, controlling, or inhibiting a pest comprising, applying a pesticidally effective amount of a composition comprising (1) a combination of an Insecticidal Agent (IA) and a CRIP; wherein the IA is an IA set forth in Table B, i.e., any one or more of B1-B479; and wherein the CRIP is a TVP; and wherein the composition comprises the following amounts: an amount of a TVP or a TVP-insecticidal protein that is 8.5% wt/wt; an amount of trehalose that is 25% wt/wt; an amount of BIT that is 0.05% wt/wt; an amount of maltodextrin that is 36.3% wt/wt; an amount of potassium phosphate dibasic anhydrous (K₂HPO₄) that is 2.6% wt/wt; an amount of potassium phosphate monobasic (KH₂PO₄) that is 0.4% wt/wt; and an amount of fermentation solids that is 26.85% wt/wt, of the total weight of the composition.

[1568] In some embodiments, the present invention provides a method of combating, controlling, or inhibiting a pest comprising, applying a pesticidally effective amount of a composition comprising (1) a combination of an Insecticidal Agent (IA) and a CRIP; wherein the IA is an IA set forth in Table B, i.e., any one or more of B1-B479; and wherein the CRIP is a TVP; and wherein the composition comprises the following amounts: an amount of a TVP or a TVP-insecticidal protein that is 8.5% wt/wt; an amount of trehalose that is 25% wt/wt; an amount of BIT that is 0.05% wt/wt; an amount of maltodextrin that is 36.3% wt/wt; an amount of potassium phosphate dibasic anhydrous (K₂HPO₄) that is 2.6% wt/wt; an amount of potassium phosphate monobasic (KH₂PO₄) that is 0.4% wt/wt; and an amount of fermentation solids that is 26.85% wt/wt, of the total weight of the composition.

[1569] In some embodiments, the present invention provides a method of combating, controlling, or inhibiting a pest comprising, applying a pesticidally effective amount of a composition comprising (1) a combination of an Insecticidal Agent (IA) and a CRIP; wherein the IA is an IA set forth in Table B, i.e., any one or more of B1-B479; and wherein the CRIP is a TVP, a TVP-insecticidal protein, or a combination thereof; and (2) a plurality of excipients; wherein the TVP or TVP-insecticidal protein comprises an amino acid sequence that is at least 90% identical to the amino acid sequence according to Formula (II): E-P-D-E-I-C-R-A-X₁-M-T-N-K-E-F-T-Y-K-S-N-V-C-N-N-C-G-D-Q-V-A-A-C-E-A-E-C-F-R-N-D-V-Y-Z₁-A-C-H-E-A-Q-K-G; wherein the polypeptide comprises at least one amino acid substitution relative to the wild-type sequence of U1-agatoxin-Ta1b as set forth in SEQ ID NO:1, and wherein X₁ is R or Q; and Z₁ is T or A; or a pharmaceutically acceptable salt thereof; wherein the composition consists of an amount of TVP that is 8.5% wt/wt of the total weight of the composition; and wherein the plurality of excipients consists of the following: an amount of trehalose that is 25% wt/wt; an amount of BIT that is 0.05% wt/wt; an amount of maltodextrin that is 36.3% wt/wt; an amount of potassium phosphate dibasic anhydrous (K₂HPO₄) that is 2.6% wt/wt; an amount of potassium phosphate monobasic (KH₂PO₄) that is 0.4% wt/wt; and an amount of fermentation solids that is 26.85% wt/wt, of the total weight of the composition.

[1570] In some embodiments, the present invention provides a method of combating, controlling, or inhibiting a pest comprising, applying a pesticidally effective amount of a composition comprising (1) a combination of an Insecticidal Agent (IA) and a CRIP; wherein the IA is an IA set forth in Table B, i.e., any one or more of B1-B479; and wherein the CRIP is a TVP, a TVP-insecticidal protein, or a combination thereof; and (2) a plurality of excipients; wherein the TVP or TVP-insecticidal protein; wherein Z₁ is T and the TVP is glycosylated, or a pharmaceutically acceptable salt thereof.

[1571] In some embodiments, the present invention provides a method of combating, controlling, or inhibiting a pest comprising, applying a pesticidally effective amount of a composition comprising (1) a combination of an Insecticidal Agent (IA) and a CRIP; wherein the IA is an IA set forth in Table B, i.e., any one or more of B1-B479; and wherein the CRIP is a TVP, a TVP-insecticidal protein, or a combination thereof; and (2) a plurality of excipients; wherein the TVP or TVP-insecticidal protein; wherein X₁ is Q; and Z₁ is A, or a pharmaceutically acceptable salt thereof.

[1572] In some embodiments, the present invention provides a method of combating, controlling, or inhibiting a pest comprising, applying a pesticidally effective amount of a composition comprising (1) a combination of an Insecticidal Agent (IA) and a CRIP; wherein the IA is an IA set forth in Table B, i.e., any one or more of B1-B479; and wherein the CRIP is a TVP, a TVP-insecticidal protein, or a combination thereof and (2) a plurality of excipients; wherein the TVP or TVP-insecticidal protein; wherein the TVP comprises an amino sequence as set forth in any one of SEQ ID NOs: 2, 49, or 51.

[1573] In some embodiments, the present invention provides a method of combating, controlling, or inhibiting a pest comprising, applying a pesticidally effective amount of a composition comprising (1) a combination of an Insecticidal Agent (IA) and a CRIP; wherein the IA is an IA set forth in Table B, i.e., any one or more of B1-B479; and wherein the CRIP is a TVP, a TVP-insecticidal protein, or a combination thereof and (2) a plurality of excipients; wherein the TVP or TVP-insecticidal protein; wherein the TVP is encoded by a polynucleotide sequence as set forth in any one of SEQ ID NOs: 17, 54, or 56, or a complementary nucleotide sequence thereof.

[1574] In some embodiments, the present invention provides a method of combating, controlling, or inhibiting a pest comprising, applying a pesticidally effective amount of a composition comprising (1) a combination of an Insecticidal Agent (IA) and a CRIP; wherein the IA is an IA set forth in Table B, i.e., any one or more of B1-B479; and wherein the CRIP is a TVP, a TVP-insecticidal protein, or a combination thereof and (2) a plurality of excipients; wherein the TVP or TVP-insecticidal protein; wherein the TVP further comprises a homopolymer or heteropolymer of two or more TVPs, wherein the amino acid sequence of each TVP is the same or different.

[1575] In some embodiments, the present invention provides a method of combating, controlling, or inhibiting a pest comprising, applying a pesticidally effective amount of a composition comprising (1) a combination of an Insecticidal Agent (IA) and a CRIP; wherein the IA is an IA set forth in Table B, i.e., any one or more of B1-B479; and wherein the CRIP is a TVP, a TVP-insecticidal protein, or a combination thereof; and (2) a plurality of excipients; wherein the TVP or TVP-insecticidal protein; wherein the TVP is a fused protein comprising two or more TVPs separated by a cleavable or non-cleavable linker, and wherein the amino acid sequence of each TVP may be the same or different.

[1576] In some embodiments, the present invention provides a method of combating, controlling, or inhibiting a pest comprising, applying a pesticidally effective amount of a composition comprising (1) a combination of an Insecticidal Agent (IA) and a CRIP; wherein the IA is an IA set forth in Table B, i.e., any one or more of B1-B479; and wherein the CRIP is a TVP, a TVP-insecticidal protein, or a combination thereof and (2) a plurality of excipients; wherein the TVP or TVP-insecticidal protein; wherein the linker is a cleavable linker.

[1577] In some embodiments, the present invention provides a method of combating, controlling, or inhibiting a pest comprising, applying a pesticidally effective amount of a composition comprising (1) a combination of an Insecticidal Agent (IA) and a CRIP; wherein the IA is an IA set forth in Table B, i.e., any one or more of B1-B479; and wherein the CRIP is a TVP, a TVP-insecticidal protein, or a combination thereof and (2) a plurality of excipients; wherein the TVP or TVP-insecticidal protein; wherein the cleavable linker is cleavable inside the gut or hemolymph of an insect.

[1578] In some embodiments, the present invention provides a method of combating, controlling, or inhibiting a pest comprising, applying a pesticidally effective amount of a composition comprising (1) a combination of an Insecticidal Agent (IA) and a CRIP; wherein the IA is an IA set forth in Table B, i.e., any one or more of B1-B479; and wherein the CRIP is a TVP, a TVP-insecticidal protein, or a combination thereof; and (2) a plurality of excipients; wherein the TVP or TVP-insecticidal protein comprises an amino acid sequence that is at least 90% identical to the amino acid sequence according to Formula (II): E-P-D-E-I-C-R-A-X₁-M-T-N-K-E-F-T-Y-K-S-N-V-C-N-N-C-G-D-Q-V-A-A-C-E-A-E-C-F-R-N-D-V-Y-Z₁-A-C-H-E-A-Q-K-G; wherein the polypeptide comprises at least one amino acid substitution relative to the wild-type sequence of U1-agatoxin-Ta1b as set forth in SEQ ID NO:1, and wherein X₁ is R or Q; and Z₁ is T or A; or a pharmaceutically acceptable salt thereof; wherein the composition consists of an amount of TVP that is 8.5% wt/wt of the total weight of the composition; and wherein the plurality of excipients consists of the following: an amount of trehalose that is 25% wt/wt; an amount of BIT that is 0.05% wt/wt; an amount of maltodextrin that is 36.3% wt/wt; an amount of potassium phosphate dibasic anhydrous (K₂HPO₄) that is 2.6% wt/wt; an amount of potassium phosphate monobasic (KH₂PO₄) that is 0.4% wt/wt; and an amount of fermentation solids that is 26.85% wt/wt, of the total weight of the composition; wherein if Z₁ is T or S, then the TVP is glycosylated.

[1579] In some embodiments, the present invention provides a method of combating, controlling, or inhibiting a pest comprising, applying a pesticidally effective amount of a combination comprising a combination of an Insecticidal Agent (IA) and a CRIP; wherein the IA is an IA set forth in Table B, i.e., any one or more of B1-B479; and wherein the CRIP is an insecticidal U₁-agatoxin-Ta1b variant polypeptide (TVP), said TVP comprising an amino acid sequence that is at least 90% identical to the amino acid sequence set forth in any one of SEQ ID NOs: 2, 49, or 51; or a pharmaceutically acceptable salt thereof, to the locus of the pest.

[1580] In some embodiments, the present invention provides a method of combating, controlling, or inhibiting a pest comprising, applying a pesticidally effective amount of a combination comprising a combination of an Insecticidal Agent (IA) and a CRIP; wherein the IA is an IA set forth in Table B, i.e., any one or more of B1-B479; and wherein the CRIP is an insecticidal U₁-agatoxin-Ta1b variant polypeptide (TVP), said TVP comprising an amino acid sequence set forth in any one of SEQ ID NOs: 2, 49, or 51; or a pharmaceutically acceptable salt thereof, to the locus of the pest.

[1581] In some embodiments, the present invention provides a method of combating, controlling, or inhibiting a pest comprising, applying a pesticidally effective amount of a combination comprising a combination of an Insecticidal Agent (IA) and a CRIP; wherein the IA is an IA set forth in Table B, i.e., any one or more of B1-B479; and wherein the CRIP is an insecticidal U₁-agatoxin-Ta1b variant polypeptide (TVP), said TVP consisting of an amino acid sequence set forth in any one of SEQ ID NOs: 2, 49, or 51; or a pharmaceutically acceptable salt thereof, to the locus of the pest.

[1582] In some embodiments, the present invention provides a method of combating, controlling, or inhibiting a pest comprising, applying a pesticidally effective amount of a combination comprising a combination of an Insecticidal Agent (IA) and a CRIP; wherein the IA is an IA set forth in Table B, i.e., any one or more of B1-B479; and wherein the CRIP is an insecticidal U₁-agatoxin-Ta1b variant polypeptide (TVP), said TVP comprising an amino acid sequence that is at least 90% identical to the amino acid sequence set forth in SEQ ID NO 51, or a pharmaceutically acceptable salt thereof, to the locus of the pest.

[1583] In some embodiments, the present invention provides a method of combating, controlling, or inhibiting a pest comprising, applying a pesticidally effective amount of a combination comprising a combination of an Insecticidal Agent (IA) and a CRIP; wherein the IA is an IA set forth in Table B, i.e., any one or more of B1-B479; and wherein the CRIP is an insecticidal U₁-agatoxin-Ta1b variant polypeptide (TVP), said TVP comprising an amino acid sequence set forth in SEQ ID NO: 51, or a pharmaceutically acceptable salt thereof, to the locus of the pest.

[1584] In some embodiments, the present invention provides a method of combating, controlling, or inhibiting a pest comprising, applying a pesticidally effective amount of a combination comprising a combination of an Insecticidal Agent (IA) and a CRIP; wherein the IA is an IA set forth in Table B, i.e., any one or more of B1-B479; and wherein the CRIP is an insecticidal U₁-agatoxin-Ta1b variant polypeptide (TVP), said TVP consisting of an amino acid sequence set forth in SEQ ID NO: 51, or a pharmaceutically acceptable salt thereof, to the locus of the pest.

[1585] Any of the foregoing combinations comprising (1) one or more CRIPs, or pharmaceutically acceptable salts thereof; one or more CRIP-insecticidal proteins, or pharmaceutically acceptable salts thereof; or a combination thereof; and (2) one or more Insecticidal Agents (IA), as described herein, can be used in the any of the compositions described herein and the methods of using the same, i.e., to combat, control, or inhibit a pest and/or to apply to the locus of a pest, wherein the pest is selected from the group consisting of: Achema Sphinx Moth (Hornworm) (Eumorpha achemon); Alfalfa Caterpillar (Colias eurytheme); Almond Moth (Caudra cautella); Amorbia Moth (Amorbia humerosana); Armyworm (Spodoptera spp., e.g. exigua, frugiperda, littoralis, Pseudaletia unipuncta); Artichoke Plume Moth (Platyptilia carduidactyla); Azalea Caterpillar (Datana major); Bagworm (Thyridopteryx); ephemeraeformis); Banana Moth (Hypercompe scribonia); Banana Skipper (Erionota thrax); Blackheaded Budworm (Acleris gloverana); California Oakworm (Phryganidia californica); Spring Cankerworm (Paleacrita merriccata); Cherry Fruitworm (Grapholita packardi); China Mark Moth (Nymphula stagnata); Citrus Cutworm (Xylomyges curia/is); Codling Moth (Cydia pomonella); Cranberry Fruitworm (Acrobasis vaccinii); Cross-striped Cabbageworm (Evergestis rimosalis); Cutworm (Noctuid species, Agrotis ipsilon); Douglas Fir Tussock Moth (Orgyia pseudotsugata); Ello Moth (Hornworm) (Erinnyis ello); Elm Spanworm (Ennomos subsignaria); European Grapevine Moth (Lobesia botrana); European Skipper (Thymelicus lineola (Essex Skipper); Fall Webworm (Melissopus latiferreanus; Filbert Leafroller (Archips rosanus; Fruittree Leafroller (Archips argyrospilia; Grape Berry Moth (Paralobesia viteana; Grape Leafroller (Platynota stultana; Grapeleaf Skeletonizer (Harrisina americana (ground only); Green Cloverworm (Plathypena scabra; Greenstriped Mapleworm (Dryocampa rubicunda; Gummosos-Batrachedra; Comosae (Hodges); Gypsy Moth (Lymantria dispar); Hemlock Looper (Lambdina fiscellaria); Hornworm (Manduca spp.); Imported Cabbageworm (Pieris rapae); Io Moth (Automeris io); Jack Pine Budworm (Choristoneura pinus); Light Brown Apple Moth (Epiphyas postvittana); Melonworm (Diaphania hyalinata); Mimosa Webworm (Homadaula anisocentra); Obliquebanded Leafroller (Choristoneura rosaceana); Oleander Moth (Syntomeida epilais); Omnivorous Leafroller (Playnota stultana); Omnivorous Looper (Sabulodes aegrotata); Orangedog (Papilio cresphontes); Orange Tortrix (Argyrotaenia citrana); Oriental Fruit Moth (Grapholita molesta); Peach Twig Borer (Anarsia lineatella); Pine Butterfly (Neophasia menapia); Podworm (Heliocoverpa zea); Redbanded Leafroller (Argyrotaenia velutinana); Redhumped Caterpillar (Schizura concinna); Rindworm Complex (Various Leps.); Saddleback Caterpillar (Sibine stimulea); Saddle Prominent Caterpillar Heterocampa guttivitta); Saltmarsh Caterpillar (Estigmene acrea); Sod Webworm (Crambus spp.); Spanworm (Ennomos subsignaria); Fall Cankerworm (Alsophila pometaria); Spruce Budworm (Choristoneura fumiferana); Tent Caterpillar (Various Lasiocampidae); Thecla-Thecla Basilides (Geyr) Thecla basilides); Tobacco Hornworm (Manduca sexta); Tobacco Moth (Ephestia elute/la); Tufted Apple Budmoth (Platynota idaeusalis); Twig Borer (Anarsia lineatella); Variegated Cutworm (Peridroma saucia); Variegated Leafroller (Platynota flavedana); Velvetbean Caterpillar (Anticarsia gemmatalis); Walnut Caterpillar (Datana integerrima); Webworm (Hyphantria cunea); Western Tussock Moth (Orgyia vetusta); Southern Cornstalk Borer (Diatraea crambidoides); Corn Earworm; Sweet potato weevil; Pepper weevil; Citrus root weevil; Strawberry root weevil; Pecan weevil; Filbert weevil; Ricewater weevil; Alfalfa weevil; Clover weevil; Tea shot-hole borer; Root weevil; Sugarcane beetle; Coffee berry borer; Annual blue grass weevil (Listronotus maculicollis); Asiatic garden beetle (Maladera castanea); European chafer (Rhizotroqus majalis); Green June beetle (Cotinis nitida); Japanese beetle (Popillia japonica); May or June beetle (Phyllophaga sp.); Northern masked chafer (Cyclocephala borealis); Oriental beetle (Anomala orientalis); Southern masked chafer (Cyclocephala lurida); Billbug (Curculionoidea); Aedes aegypti; Busseola fusca; Chilo suppressalis; Culex pipiens; Culex quinquefasciatus; Diabrotica virgifera; Diatraea saccharalis; Helicoverpa armigera; Helicoverpa zea; Heliothis virescens; Leptinotarsa decemlineata; Ostrinia furnacalis; Ostrinia nubilalis; Pectinophora gossypiella; Plodia interpunctella; Plutella xylostella; Pseudoplusia includens; Spodoptera exigua; Spodoptera frugiperda; Spodoptera littoralis; Trichoplusia ni; and Xanthogaleruca luteola.

[1586] Crops and Pests

[1587] Specific crop pests and insects that may be controlled by these methods include the following: Dictyoptera (cockroaches); Isoptera (termites); Orthoptera (locusts, grasshoppers and crickets); Diptera (house flies, mosquito, tsetse fly, crane-flies and fruit flies); Hymenoptera (ants, wasps, bees, saw-flies, ichneumon flies and gall-wasps); Anoplura (biting and sucking lice); Siphonaptera (fleas); and Hemiptera (bugs and aphids), as well as arachnids such as Acari (ticks and mites), and the parasites that each of these organisms harbor.

[1588] “Pest” includes, but is not limited to: insects, fungi, bacteria, nematodes, mites, ticks, and the like.

[1589] Insect pests include, but are not limited to, insects selected from the orders Coleoptera, Diptera, Hymenoptera, Lepidoptera, Mallophaga, Homoptera, Hemiptera, Orthroptera, Thysanoptera, Dermaptera, Isoptera, Anoplura, Siphonaptera, Trichoptera, and the like. More particularly, insect pests include Coleoptera, Lepidoptera, and Diptera.

[1590] Insects of suitable agricultural, household and/or medical/veterinary importance for treatment with the insecticidal polypeptides include, but are not limited to, members of the following classes and orders:

[1591] The order Coleoptera includes the suborders Adephaga and Polyphaga. Suborder Adephaga includes the superfamilies Caraboidea and Gyrinoidea. Suborder Polyphaga includes the superfamilies Hydrophiloidea, Staphylinoidea, Cantharoidea, Cleroidea, Elateroidea, Dascilloidea, Dryopoidea, Byrrhoidea, Cucujoidea, Meloidea, Mordelloidea, Tenebrionoidea, Bostrichoidea, Scarabaeoidea, Cerambycoidea, Chrysomeloidea, and Curculionoidea. Superfamily Caraboidea includes the families Cicindelidae, Carabidae, and Dytiscidae. Superfamily Gyrinoidea includes the family Gyrinidae. Superfamily Hydrophiloidea includes the family Hydrophilidae. Superfamily Staphylinoidea includes the families Silphidae and Staphylinidae. Superfamily Cantharoidea includes the families Cantharidae and Lampyridae. Superfamily Cleroidea includes the families Cleridae and Dermestidae. Superfamily Elateroidea includes the families Elateridae and Buprestidae. Superfamily Cucujoidea includes the family Coccinellidae. Superfamily Meloidea includes the family Meloidae. Superfamily Tenebrionoidea includes the family Tenebrionidae. Superfamily Scarabaeoidea includes the families Passalidae and Scarabaeidae. Superfamily Cerambycoidea includes the family Cerambycidae. Superfamily Chrysomeloidea includes the family Chrysomelidae. Superfamily Curculionoidea includes the families Curculionidae and Scolytidae.

[1592] Examples of Coleoptera include, but are not limited to: the American bean weevil Acanthoscelides obtectus, the leaf beetle Agelastica alni, click beetles (Agriotes lineatus, Agriotes obscurus, Agriotes bicolor), the grain beetle Ahasverus advena, the summer schafer Amphimallon solstitialis, the furniture beetle Anobium punctatum, Anthonomus spp. (weevils), the Pygmy mangold beetle Atomaria linearis, carpet beetles (Anthrenus spp., Attagenus spp.), the cowpea weevil Callosobruchus maculates, the fried fruit beetle Carpophilus hemipterus, the cabbage seedpod weevil Ceutorhynchus assimilis, the rape winter stem weevil Ceutorhynchus picitarsis, the wireworms Conoderus vespertinus and Conoderus falli, the banana weevil Cosmopolites sordidus, the New Zealand grass grub Costelytra zealandica, the June beetle Cotinis nitida, the sunflower stem weevil Cylindrocopturus adspersus, the larder beetle Dermestes lardarius, the corn rootworms Diabrotica virgifera, Diabrotica virgifera virgifera, and Diabrotica barberi, the Mexican bean beetle Epilachna varivestis, the old house borer Hylotropes bajulus, the lucerne weevil Hypera postica, the shiny spider beetle Gibbium psylloides, the cigarette beetle Lasioderma serricorne, the Colorado potato beetle Leptinotarsa decemlineata, Lyctus beetles (Lyctus spp.), the pollen beetle Meligethes aeneus, the common cockshafer Melolontha melolontha, the American spider beetle Mezium americanum, the golden spider beetle Niptus hololeucus, the grain beetles Oryzaephilus surinamensis and Otyzaephilus mercator, the black vine weevil Otiorhynchus sulcatus, the mustard beetle Phaedon cochleariae, the crucifer flea beetle Phyllotreta cruciferae, the striped flea beetle Phyllotreta striolata, the cabbage steam flea beetle Psylliodes chrysocephala, Ptinus spp. (spider beetles), the lesser grain borer Rhizopertha dominica, the pea and been weevil Sitona lineatus, the rice and granary beetles Sitophilus oryzae and Sitophilus granaries, the red sunflower seed weevil Smicronyx fitivus, the drugstore beetle Stegobium paniceum, the yellow mealworm beetle Tenebrio molitor, the flour beetles Tribolium castaneum and Tribolium confusum, warehouse and cabinet beetles (Trogoderma spp.), and the sunflower beetle Zygogramma exclamationis.

[1593] Examples of Dermaptera (earwigs) include, but are not limited to: the European earwig, Forficula auricularia, and the striped earwig, Labidura riparia.

[1594] Examples of Dictvontera include, but are not limited to: the oriental cockroach, Blatta orientalis, the German cockroach, Blatella germanica, the Madeira cockroach, Leucophaea maderae, the American cockroach, Periplaneta americana, and the smokybrown cockroach Periplaneta fuliginosa.

[1595] Examples of Diplonoda include, but are not limited to: the spotted snake millipede Blaniulus guttulatus, the flat-back millipede Brachydesmus superus, and the greenhouse millipede Oxidus gracilis.

[1596] The order Diptera includes the Suborders Nematocera, Brachycera, and Cyclorrhapha. Suborder Nematocera includes the families Tipulidae, Psychodidae, Culicidae, Ceratopogonidae, Chironomidae, Simuliidae, Bibionidae, and Cecidomyiidae. Suborder Brachycera includes the families Stratiomyidae, Tabanidae, Therevidae, Asilidae, Mydidae, Bombyliidae, and Dolichopodidae. Suborder Cyclorrhapha includes the Divisions Aschiza and Aschiza. Division Aschiza includes the families Phoridae, Syrphidae, and Conopidae. Division Aschiza includes the Sections Acalyptratae and Calyptratae. Section Acalyptratae includes the families Otitidae, Tephritidae, Agromyzidae, and Drosophilidae. Section Calyptratae includes the families Hippoboscidae, Oestridae, Tachinidae, Anthomyiidae, Muscidae, Calliphoridae, and Sarcophagidae.

[1597] Examples of Diptera include, but are not limited to: the house fly (Musca domestica), the African tumbu fly (Cordylobia anthropophaga), biting midges (Culicoides spp.), bee louse (Braula spp.), the beet fly Pegomyia betae, blackflies (Cnephia spp., Eusimulium spp., Simulium spp.), bot flies (Cuterebra spp., Gastrophilus spp., Oestrus spp.), craneflies (Tipula spp.), eye gnats (Hippelates spp.), filth-breeding flies (Calliphora spp., Fannia spp., Hermetia spp., Lucilia spp., Musca spp., Muscina spp., Phaenicia spp., Phormia spp.), flesh flies (Sarcophaga spp., Wohlfahrtia spp.); the flit fly Oscinella frit, fruifflies (Dacus spp., Drosophila spp.), head and canon flies (Hydrotea spp.), the hessian fly Mayetiola destructor, horn and buffalo flies (Haematobia spp.), horse and deer flies (Chrysops spp., Haematopota spp., Tabanus spp.), louse flies (Lipoptena spp., Lynchia spp., and Pseudolynchia spp.), medflies (Ceratitus spp.), mosquitoes (Aedes spp., Anopheles spp., Culex spp., Psorophora spp.), sandflies (Phlebotomus spp., Lutzomyia spp.), screw-worm flies (Chtysomya bezziana and Cochliomyia hominivorw), sheep keds (Melophagus spp.); stable flies (Stomoxys spp.), tsetse flies (Glossina spp.), and warble flies (Hypoderma spp.).

[1598] Examples of Isontera (termites) include, but are not limited to: species from the familes Hodotennitidae, Kalotermitidae, Mastotermitidae, Rhinotennitidae, Serritermitidae, Termitidae, and Termopsidae.

[1599] Examples of Heteroptera include, but are not limited to: the bed bug Cimex lectularius, the cotton stainer Dysdercus intermedius, the Sunn pest Eurygaster integriceps, the tarnished plant bug Lygus lineolaris, the green stink bug Nezara antennata, the southern green stink bug Nezara viridula, and the triatomid bugs Panstrogylus megistus, Rhodnius ecuadoriensis, Rhodnius pallescans, Rhodnius prolixus, Rhodnius robustus, Triatoma dimidiata, Triatoma infestans, and Triatoma sordida.

[1600] Examples of Homoptera include, but are not limited to: the California red scale Aonidiella aurantii, the black bean aphid Aphis fabae, the cotton or melon aphid Aphis gossypii, the green apple aphid Aphis pomi, the citrus spiny whitefly Aleurocanthus spiniferus, the oleander scale Aspidiotus hederae, the sweet potato whitefly Bemesia tabaci, the cabbage aphid Brevicoryne brassicae, the pear psylla Cacopsylla pyricola, the currant aphid Cryptomyzus ribis, the grape phylloxera Daktulosphaira vitifoliae, the citrus psylla Diaphorina citri, the potato leafhopper Empoasca fabae, the bean leafhopper Empoasca solana, the vine leafhopper Empoasca vitis, the woolly aphid Eriosoma lanigerum, the European fruit scale Eulecanium corni, the mealy plum aphid Hyalopterus arundinis, the small brown planthopper Laodelphax striatellus, the potato aphid Macrosiphum euphorbiae, the green peach aphid Myzus persicae, the green rice leafhopper Nephotettix cinticeps, the brown planthopper Nilaparvata lugens, gall-forming aphids (Pemphigus spp.), the hop aphid Phorodon humuli, the bird-cherry aphid Rhopalosiphum padi, the black scale Saissetia oleae, the greenbug Schizaphis graminum, the grain aphid Sitobion avenae, and the greenhouse whitefly Trialeurodes vaporariorum.

[1601] Examples of Isopoda include, but are not limited to: the common pillbug Armadillidium vulgare and the common woodlouse Oniscus asellus.

[1602] The order Lepidoptera includes the families Papilionidae, Pieridae, Lycaenidae, Nymphalidae, Danaidae, Satyridae, Hesperiidae, Sphingidae, Saturniidae, Geometridae, Arctiidae, Noctuidae, Lymantriidae, Sesiidae, and Tineidae.

[1603] Examples of Lepidoptera include, but are not limited to: Adoxophyes orana (summer fruit tortrix moth), Agrotis ipsolon (black cutworm), Archips podana (fruit tree tortrix moth), Bucculatrix pyrivorella (pear leafminer), Bucculatrix thurberiella (cotton leaf perforator), Bupalus piniarius (pine looper), Carpocapsa pomonella (codling moth), Chilo suppressalis (striped rice borer), Choristoneura fumiferana (eastern spruce budworm), Cochylis hospes (banded sunflower moth), Diatraea grandiosella (southwestern corn borer), Earls insulana (Egyptian bollworm), Euphestia kuehniella (Mediterranean flour moth), Eupoecilia ambiguella (European grape berry moth), Euproctis chrysorrhoea (brown-tail moth), Euproctis subflava (oriental tussock moth), Galleria mellonella (greater wax moth), Helicoverpa armigera (cotton bollworm), Helicoverpa zea (cotton bollworm), Heliothis virescens (tobacco budworm), Hofmannophila pseudopretella (brown house moth), Homeosoma electellum (sunflower moth), Homona magnanima (oriental tea tree tortrix moth), Lithocolletis blancardella (spotted tentiform leafminer), Lymantria dispar (gypsy moth), Malacosoma neustria (tent caterpillar), Mamestra brassicae (cabbage armyworm), Mamestra configurata (Bertha armyworm), the hornworms Manduca sexta and Manuduca quinquemaculata, Operophtera brumata (winter moth), Ostrinia nubilalis (European corn borer), Panolis flammea (pine beauty moth), Pectinophora gossypiella (pink bollworm), Phyllocnistis citrella (citrus leafminer), Pieris brassicae (cabbage white butterfly), Plutella xylostella (diamondback moth), Rachiplusia ni (soybean looper), Spilosoma virginica (yellow bear moth), Spodoptera exigua (beet armyworm), Spodoptera frugiperda (fall armyworm), Spodoptera littoralis (cotton leafworin), Spodoptera litura (common cutworm), Spodoptera praefica (yellowstriped armyworm), Sylepta derogata (cotton leaf roller), Tineola bisselliella (webbing clothes moth), Tineola pellionella (case-making clothes moth), Tortrix viridana (European oak leafroller), Trichoplusia ni (cabbage looper), and Yponomeuta padella (small ermine moth).

[1604] Examples of Orthoptera include, but are not limited to: the common cricket Acheta domesticus, tree locusts (Anacridium spp.), the migratory locust Locusta migratoria, the two striped grasshopper Melanoplus bivittatus, the differential grasshopper Melanoplus dfferentialis, the redlegged grasshopper Melanoplus femurrubrum, the migratory grasshopper Melanoplus sanguinipes, the northern mole cricket Neocurtilla hexadectyla, the red locust Nomadacris septemfasciata, the shortwinged mole cricket Scapteriscus abbreviatus, the southern mole cricket Scapteriscus borellii, the tawny mole cricket Scapteriscus vicinus, and the desert locust Schistocerca gregaria.

[1605] Examples of Phthiraptera include, but are not limited to: the cattle biting louse Bovicola bovis, biting lice (Damalinia spp.), the cat louse Felicola subrostrata, the shortnosed cattle louse Haematopinus eloysternus, the tail-switch louse Haematopinus quadriperiussus, the hog louse Haematopinus suis, the face louse Linognathus ovillus, the foot louse Linognathus pedalis, the dog sucking louse Linognathus setosus, the long-nosed cattle louse Linognathus vituli, the chicken body louse Menacanthus stramineus, the poultry shaft louse Menopon gallinae, the human body louse Pediculus humanus, the pubic louse Phthirus pubis, the little blue cattle louse Solenopotes capillatus, and the dog biting louse Trichodectes canis.

[1606] Examples of Psocoptera include, but are not limited to: the booklice Liposcelis bostrychophila, Liposcelis decolor, Liposcelis entomophila, and Trogium pulsatorium. Examples of Siphonaptera include, but are not limited to: the bird flea Ceratophyllus gallinae, the dog flea Ctenocephalides canis, the cat flea Ctenocephalides fells, the human flea Pulex irritans, and the oriental rat flea Xenopsylla cheopis.

[1607] Examples of Symphyla include, but are not limited to: the garden symphylan Scutigerella immaculate.

[1608] Examples of Thysanura include, but are not limited to: the gray silverfish Ctenolepisma longicaudata, the four-lined silverfish Ctenolepisma quadriseriata, the common silverfish Lepisma saccharina, and the firebrat Thennobia domestica;

[1609] Examples of Thysanoptera include, but are not limited to: the tobacco thrips Frankliniella fusca, the flower thrips Frankliniella intonsa, the western flower thrips Frankliniella occidentalis, the cotton bud thrips Frankliniella schultzei, the banded greenhouse thrips Hercinothrips femoralis, the soybean thrips Neohydatothrips variabilis, Kelly's citrus thrips Pezothrips kellyanus, the avocado thrips Scirtothrips perseae, the melon thrips Thrips palmi, and the onion thrips Thrips tabaci.

[1610] Examples of Nematodes include, but are not limited to: parasitic nematodes such as root-knot, cyst, and lesion nematodes, including Heterodera spp., Meloidogyne spp., and Globodera spp.; particularly members of the cyst nematodes, including, but not limited to: Heterodera glycines (soybean cyst nematode); Heterodera schachtii (beet cyst nematode); Heterodera avenae (cereal cyst nematode); and Globodera rostochiensis and Globodera pailida (potato cyst nematodes). Lesion nematodes include, but are not limited to: Pratylenchus spp.

[1611] Other insect species susceptible to a combination comprising one or more CRIPs (e.g., one or more of CRIPs: A1-A34 in Table A) and one or more IAs (e.g., one or more of IAs: B1-B479 in Table B) of the present disclosure include: athropod pests that cause public and animal health concerns, for example, mosquitos for example, mosquitoes from the genera Aedes, Anopheles and Culex, from ticks, flea, and flies etc.

[1612] In one embodiment, the combination comprising one or more CRIPs (e.g., one or more of CRIPs: A1-A34 in Table A) and one or more IAs (e.g., one or more of IAs: B1-B479 in Table B) can be employed to treat ectoparasites. Ectoparasites include, but are not limited to: fleas, ticks, mange, mites, mosquitoes, nuisance and biting flies, lice, and combinations comprising one or more of the foregoing ectoparasites. The term “fleas” includes the usual or accidental species of parasitic flea of the order Siphonaptera, and in particular the species Ctenocephalides, in particular C. fells and C. cams, rat fleas (Xenopsylla cheopis) and human fleas (Pulex irritans).

[1613] Insect pests of the invention for the major crops include, but are not limited to: Maize: Ostrinia nubilalis, European corn borer; Agrotis ipsilon, black cutworm; Helicoverpa zea, corn earworm; Spodoptera frugiperda, fall armyworm; Diatraea grandiosella, southwestern corn borer; Elasmopalpus lignosellus, lesser cornstalk borer; Diatraea saccharalis, surgarcane borer; Diabrotica virgifera, western corn rootworm; Diabrotica longicornis barberi, northern corn rootworm; Diabrotica undecimpunctata howardi, southern corn rootworm; Melanotus spp., wireworms; Cyclocephala borealis, northern masked chafer (white grub); Cyclocephala immaculata, southern masked chafer (white grub); Popillia japonica, Japanese beetle; Chaetocnema pulicaria, corn flea beetle; Sphenophorus maidis, maize billbug; Rhopalosiphum maidis, corn leaf aphid; Anuraphis maidiradicis, corn root aphid; Blissus leucopterus leucopterus, chinch bug; Melanoplus femurrubrum, redlegged grasshopper; Melanoplus sanguinipes, migratory grasshopper; Hylemya platura, seedcorn maggot; Agromyza parvicornis, corn blot leafminer; Anaphothrips obscrurus, grass thrips; Solenopsis milesta, thief ant; Tetranychus urticae, twospotted spider mite; Sorghum: Chilo partellus, sorghum borer; Spodoptera frugiperda, fall armyworm; Helicoverpa zea, corn earworm; Elasmopalpus lignosellus, lesser cornstalk borer; Feltia subterranea, granulate cutworm; Phyllophaga crinita, white grub; Eleodes, Conoderus, and Aeolus spp., wireworms; Oulema melanopus, cereal leaf beetle; Chaetocnema pulicaria, corn flea beetle; Sphenophorus maidis, maize billbug; Rhopalosiphum maidis, corn leaf aphid; Sipha flava, yellow sugarcane aphid; Blissus leucopterus leucopterus, chinch bug; Contarinia sorghicola, sorghum midge; Tetranychus cinnabarinus, carmine spider mite; Tetranychus urticae, twospotted spider mite; Wheat: Pseudaletia unipunctata, army worm; Spodoptera frugiperda, fall armyworm; Elasmopalpus lignosellus, lesser cornstalk borer; Agrotis orthogonia, western cutworm; Elasmopalpus lignosellus, lesser cornstalk borer; Oulema melanopus, cereal leaf beetle; Hypera punctata, clover leaf weevil; Diabrotica undecimpunctata howardi, southern corn rootworm; Russian wheat aphid; Schizaphis graminum, greenbug; Macrosiphum avenae, English grain aphid; Melanoplus femurrubrum, redlegged grasshopper; Melanoplus differentialis, differential grasshopper; Melanoplus sanguinipes, migratory grasshopper; Mayetiola destructor, Hessian fly; Sitodiplosis mosellana, wheat midge; Meromyza americana, wheat stem maggot; Hylemya coarctata, wheat bulb fly; Frankliniella fusca, tobacco thrips; Cephus cinctus, wheat stem sawfly; Aceria tulipae, wheat curl mite; Sunflower: Suleima helianthana, sunflower bud moth; Homoeosoma electellum, sunflower moth; Zygogramma exclamationis, sunflower beetle; Bothyrus gibbosus, carrot beetle; Neolasioptera murtfeldtiana, sunflower seed midge; Cotton: Heliothis virescens, cotton budworm; Helicoverpa zea, cotton bollworm; Spodoptera exigua, beet armyworm; Pectinophora gossypiella, pink bollworm; Anthonomus grandis, boll weevil; Aphis gossypii, cotton aphid; Pseudatomoscelis seriatus, cotton fleahopper; Trialeurodes abutilonea, banded winged whitefly; Lygus lineolaris, tarnished plant bug; Melanoplus femurrubrum, redlegged grasshopper; Melanoplus differentialis, differential grasshopper; Thrips tabaci, onion thrips; Franklinkiella fusca, tobacco thrips; Tetranychus cinnabarinus, carmine spider mite; Tetranychus urticae, twospotted spider mite; Rice: Diatraea saccharalis, sugarcane borer; Spodoptera frugiperda, fall armyworm; Helicoverpa zea, corn earworm; Colaspis brunnea, grape colaspis; Lissorhoptrus oryzophilus, rice water weevil; Sitophilus oryzae, rice weevil; Nephotettix nigropictus, rice leafhopper; Blissus leucopterus, chinch bug; Acrosternum hilare, green stink bug; Soybean: Pseudoplusia includens, soybean looper; Anticarsia gemmatalis, velvet bean caterpillar; Plathypena scabra, green clover worm; Ostrinia nubilalis, European corn borer; Agrotis ipsilon, black cutworm; Spodoptera exigua, beet armyworm; Heliothis virescens, cotton budworm; Helicoverpa zea, cotton bollworm; Epilachna varivestis, Mexican bean beetle; Myzus persicae, green peach aphid; Empoasca fabae, potato leafhopper; Acrosternum hilare, green stink bug; Melanoplus femurrubrum, redlegged grasshopper; Melanoplus differentialis, differential grasshopper; Hylemya platura, seedcorn maggot; Sericothrips variabilis, soybean thrips; Thrips tabaci, onion thrips; Tetranychus turkestani, strawberry spider mite; Tetranychus urticae, twospotted spider mite; Barley: Ostrinia nubilalis, European corn borer; Agrotis ipsilon, black cutworm; Schizaphis graminum, greenbug; Blissus leucopterus leucopterus, chinch bug; Acrosternum hilare, green stink bug; Euschistus servus, brown stink bug; Delia platura, seedcorn maggot; Mayetiola destructor, Hessian fly; Petrobia latens, brown wheat mite; Oil Seed Rape: Brevicoryne brassicae, cabbage aphid; Phyllotreta cruciferae, Flea beetle; Mamestra configurata, Bertha armyworm; Plutella xylostella, Diamond-back moth; Delia ssp., Root maggots.

[1614] In some embodiments, a combination comprising one or more CRIPs (e.g., one or more of CRIPs: A1-A34 in Table A) and one or more IAs (e.g., one or more of IAs: B1-B479 in Table B) can be employed to treat any one or more of the foregoing insects.

[1615] The insects that are susceptible to the combinations and compositions of this invention include but are not limited to the following: Cyt toxins affected familes such as: Blattaria, Coleoptera, Collembola, Diptera, Echinostomida, Hemiptera, Hymenoptera, Isoptera, Lepidoptera, Neuroptera, Orthoptera, Rhabditida, Siphonoptera, and Thysanoptera. Genus Species are indicated as follows: Actebia fennica, Agrotis ipsilon, A. segetum, Anticarsia gemmatalis, Argyrotaenia citrana, Artogeia rapae, Bombyx mori, Busseola fusca, Cacyreus marshall, Chilo suppressalis, Christoneura fumiferana, C. occidentalis, C. pinus pinus, C. rosacena, Cnaphalocrocis medinalis, Conopomorpha cramerella, Ctenopsuestis obliquana, Cydia pomonella, Danaus plexippus, Diatraea saccharallis, D. grandiosella, Earias vittella, Elasmolpalpus lignoselius, Eldana saccharina, Ephestia kuehniella, Epinotia aporema, Epiphyas postvittana, Galleria mellonella, Genus Species, Helicoverpa zea, H. punctigera, H. armigera, Heliothis virescens, Hyphantria cunea, Lambdina fiscellaria, Leguminivora glycinivorella, Lobesia botrana, Lymantria dispar, Malacosoma disstria, Mamestra brassicae, M. configurata, Manduca sexta, Marasmia patnalis, Maruca vitrata, Orgyia leucostigma, Ostrinia nubilalis, O. furnacalis, Pandemis pyrusana, Pectinophora gossypiella, Perileucoptera coffeella, Phthorimaea opercullela, Pianotortrix octo, Piatynota stultana, Pieris brassicae, Plodia interpunctala, Plutella xylostella, Pseudoplusia includens, Rachiplusia nu, Sciropophaga incertulas, Sesamia calamistis, Spilosoma virginica, Spodoptera exigua, S. frugiperda, S. littoralis, S. exempta, S. litura, Tecia solanivora, Thaumetopoea pityocampa, Trichoplusia ni, Wiseana cervinata, Wiseana copularis, Wiseana jocosa, Blattaria blattella, Collembola xenylla, C. folsomia, Echinostomida fasciola, Hemiptera oncopeltrus, He. bemisia, He. macrosiphum, He. rhopalosiphum, He. myzus, Hymenoptera diprion, Hy. apis, Hy. Macrocentrus, Hy. Meteorus, Hy. Nasonia, Hy. Solenopsis, Isopoda porcellio, Isoptera reticulitermes, Orthoptera Achta, Prostigmata tetranychus, Rhabitida acrobeloides, R. caenorhabditis, R. distolabrellus, R. panagrellus, R. pristionchus, R. pratylenchus, R. ancylostoma, R. nippostrongylus, R. panagrellus, R. haemonchus, R. meloidogyne, and Siphonaptera ctenocephalides.

[1616] The present disclosure provides methods for plant transformation, which may be used for transformation of any plant species, including, but not limited to, monocots and dicots. Crops for which a transgenic approach would be an especially useful approach include, but are not limited to: alfalfa, cotton, tomato, maize, wheat, corn, sweet corn, lucerne, soybean, sorghum, field pea, linseed, safflower, rapeseed, oil seed rape, rice, soybean, barley, sunflower, trees (including coniferous and deciduous), flowers (including those grown commercially and in greenhouses), field lupins, switchgrass, sugarcane, potatoes, tomatoes, tobacco, crucifers, peppers, sugarbeet, barley, and oilseed rape, Brassica sp., rye, millet, peanuts, sweet potato, cassaya, coffee, coconut, pineapple, citrus trees, cocoa, tea, banana, avocado, fig, guava, mango, olive, papaya, cashew, macadamia, almond, oats, vegetables, ornamentals, and conifers.

[1617] Insecticide-Resistant Pests

[1618] Resistance to insecticides occurs when there is a heritable change in the sensitivity of a pest population to insecticides; this change in sensitivity can be observed in the failure of an insecticide to achieve the desired result and/or expected degree of control when used as intended. Cross-resistance describes a pest's resistance to one insecticide that in turn confers resistance to another different insecticide—even in cases where said pest has not been confronted with the other insecticide. Information about insecticide resistance can be found on the Insecticide Resistance Action Committee (IRAC) website (https://www.irac-online.org/). Reports of insecticide resistance in insects and other pests, and the insecticides appertaining thereunto, can be found at the Arthropod Pesticide Resistance Database (APRD) (https://www.pesticideresistance.org/).

[1619] In some embodiments, an insect and/or pest may be resistant or at least partially resistant to one or more insecticides. For example, in some embodiments, an insect and/or pest may be resistant or at least partially resistant to one or more of the following insecticides: Acetylcholinesterase (AchE) inhibitors (e.g., carbamates such as alanycarb, aldicarb, bendiocarb, benfuracarb, butocarboxim, butoxycarboxim, carbaryl, carbofuran, carbosulfan, ethiofencarb, fenobucarb, formetanate, furathiocarb, isoprocarb, methiocarb, methomyl, metolcarb, oxamyl, pirimicarb, propoxur, thiodicarb, thiofanox, triazamate, trimethacarb, xmc, and xylylcarb; and organophosphates such as acephate, azamethiphos, azinphos-ethyl, azinphos-methyl, cadusafos, chlorethoxyfos, chlorfenvinphos, chlormephos, chlorpyrifos, chlorpyrifos-methyl, coumaphos, cyanophos, demeton-s-methyl, diazinon, dichlorvos/ddvp, dicrotophos, dimethoate, dimethylvinphos, disulfoton, epn, ethion, ethoprophos, famphur, fenamiphos, fenitrothion, fenthion, fosthiazate, heptenophos, isofenphos, isoxathion, malathion, mecarbam, methamidophos, methidathion, mevinphos, monocrotophos, naled, omethoate, oxydemeton-methyl, parathion, parathion-methyl, phenthoate, phosalone, phorate, phosmet, phosphamidon, phoxim, profenofos, propetamphos, prothiofos, pyraclofos, pyridaphenthion, quinalphos, sulfotep, tebupirimfos, temephos, terbufos, tetrachlorvinphos, thiometon, triazophos, trichlorfon, vamidothion, pirimiphos-methyl, imicyafos, and isopropyl o-(methoxyaminothio-phosphoryl) salicylate); Gaba-gated chloride channel blockers (e.g., cyclodiene organochlorines such as chlordane, and endosulfan; and phenylpyrazoles (fiproles) such as ethiprole, and fipronil); Sodium channel modulators (e.g., pyrethroids and pyrethrins such as acrinathrin, allethrin, d-cis-trans allethrin, d-trans allethrin, bifenthrin, bioallethrin, bioallethrin s-cyclopentenyl, bioresmethrin, cycloprothrin, cyfluthrin, beta-cyfluthrin, cyhalothrin, lambda-cyhalothrin, gamma-cyhalothrin, cypermethrin, alpha-cypermethrin, beta-cypermethrin, theta-cypermethrin, zeta-cypermethrin, cyphenothrin [(1r)-trans-isomers], deltamethrin, empenthrin [(ez)-(1r)-isomers], esfenvalerate, etofenprox, fenpropathrin, fenvalerate, flucythrinate, flumethrin, tau-fluvalinate, kadathrin, pyrethrins (pyrethrum), halfenprox, phenothrin [(1r)-trans-isomer], prallethrin, resmethrin, silafluofen, tefluthrin, tetramethrin, tetramethrin [(1r)-isomers], tralomethrin, transfluthrin, permethrin; ddt and methoxychlor); Nicotinic acetylcholine receptor (nAchR) competitive modulators (e.g., neonicotinoids such as acetamiprid, clothianidin, dinotefuran, imidacloprid, nitenpyram, thiacloprid, thiamethoxam; nicotine; sulfoximines such as sulfoxaflor; butenolides such as flupyradifurone; and mesoionics such as triflumezopyrim); Nicotinic acetylcholine receptor (nAchR) allosteric modulators—site I (e.g., spinosyns such as spinetoram and spinosad); Glutamate-gated chloride channel (GluCl) allosteric modulators (e.g., avermectins and milbemycins such as abamectin, emamectin benzoate, lepimectin, and milbemectin); Juvenile hormone mimics (e.g., juvenile hormone analogues such as hydroprene, kinoprene, and methoprene; fenoxycarb; and pyriproxyfen); Miscellaneous non-specific (multi-site) inhibitors (e.g., alkyl halides such as methyl bromide and other alkyl halides; chloropicrin; fluorides such as cryolite and sulfuryl fluoride; borates such as borax, boric acid, disodium octaborate, sodium borate, and sodium metaborate; tartar emetic; and methyl isothiocyanate generators such as dazomet and metam); Chordotonal organ TRPV channel modulators (e.g., pyridine azomethine derivatives such as pymetrozine, pyrifluquinazon; and pyropenes such as afidopyropen); Mite growth inhibitors (e.g., clofentezine and diflovidazin, hexythiazox such as clofentezine, diflovidazin, and hexythiazox; and etoxazole); Inhibitors of mitochondrial ATP synthase (e.g., diafenthiuron; organotin miticides such as azocyclotin, cyhexatin, and fenbutatin oxide; propargite; and tetradifon); Uncouplers of oxidative phosphorylation via disruption of the proton gradient (e.g., pyrroles, dinitrophenols, and sulfluramid, e.g., chlorfenapyr, dnoc, and sulfluramid); Nicotinic acetylcholine receptor (nAchR) channel blockers (e.g., nereistoxin analogues such as bensultap, cartap hydrochloride, thiocyclam, thiosultap-sodium); Ecdysone receptor agonists (e.g., diacylhydrazines such as chromafenozide, halofenozide, methoxyfenozide, and tebufenozide); Octopamine receptor agonists (e.g., amitraz); Mitochondrial complex III electron transport inhibitors (e.g., hydramethylnon; acequinocyl; fluacrypyrim; and bifenazate); Mitochondrial complex I electron transport inhibitors (e.g., meti acaricides and insecticides such as fenazaquin, fenpyroximate, pyrimidifen, pyridaben, tebufenpyrad, and tolfenpyrad; and rotenone); Voltage-dependent sodium channel blockers (e.g., oxadiazines such as indoxacarb; and semicarbazones such as metaflumizone); Inhibitors of acetyl co-enzyme A carboxylase (e.g., tetronic and tetramic acid derivatives such as spirodiclofen, spiromesifen, spiropidion, and spirotetramat); Mitochondrial complex IV electron transport inhibitors (e.g., phosphides such as aluminum phosphide, calcium phosphide, phosphine, and zinc phosphide; and cyanides such as calcium cyanide, potassium cyanide, and sodium cyanide); Mitochondrial complex II electron transport inhibitors (e.g., beta-ketonitrile derivatives such as cyenopyrafen and cyflumetofen; and carboxanilides such as pyflubumide); Ryanodine receptor modulators (e.g., diamides such as chlorantraniliprole, cyantraniliprole, cyclaniliprole, flubendiamide, and tetraniliprole); Chordotonal organ modulators—undefined target site (e.g., flonicamid); and/or GABA-gated chloride channel allosteric modulators (e.g., meta-diamides and isoxazolines such as broflanilide, fluxametamide).

[1620] In some embodiments, an insect and/or pest may be resistant or at least partially resistant to any one or more of the insecticides described herein.

[1621] In some embodiments, the compositions, combinations, and/or methods of the present invention can be applied to the locus of an insect and/or pest that is resistant or at least partially resistant to one or more insecticides, said insect and/or pest selected from the group consisting of the following commonly known insects and/or pests: yellow fever mosquito; Corn stalk borer; Asiatic rice borer; house mosquito; southern house mosquito; western corn rootworm; sugarcane borer; cotton bollworm; corn earworm; tobacco budworm; Colorado potato beetle; Asian corn borer; European corn borer; pink bollworm; Indian meal moth; diamond-back moth; soybean looper; beet army worm, lesser army worm; fall armyworm; Egyptian cotton leafworm, army worm; or cabbage looper.

[1622] In some embodiments, the compositions, combinations, and/or methods of the present invention can be applied to the locus of an insect and/or pest that is resistant or at least partially resistant to one or more insecticides, wherein said insect and/or pest selected is a blackfly or nuisance fly (e.g., Psychoda spp. And Chironomus spp.).

[1623] In some embodiments, an insect and/or pest may be resistant or at least partially resistant to one or more insecticides can be a lepidopteran, e.g., a diamondback moth.

[1624] In some embodiments, the compositions, combinations, and/or methods of the present invention can be applied to the locus of an insect and/or pest that is resistant or at least partially resistant to one or more insecticides, said insect and/or pest selected from the group consisting of: Loopers; Omnivorous Leafroller; Hornworms; Imported Cabbageworm; Diamondback Moth; Green Cloverworm; Webworm; Saltmarsh Caterpillar; Armyworms; Cutworms; Cross-Striped Cabbageworm; Podworms; Velvetbean Caterpillar; Soybean Looper; Tomato Fruitworm; Variegated Cutworm; Melonworms; Rindworm complex; Fruittree Leafroller; Citrus Cutworm; Heliothis; Orangedog; Citrus Cutworm; Redhumped Caterpillar; Tent Caterpillars; Fall Webworm; Walnut Caterpillar; Cankerworms; Gypsy Moth; Variegated Leafroller; Redbanded Leafroller; Tufted Apple Budmoth; Oriental Fruit Moth; Filbert Leafroller; Obliquebanded Leafroller; Codling Moth; Twig Borer; Grapeleaf Skeletonizer; Grape Leafroller; Achema Sphinx Moth (Hornworm); Orange Tortrix; Tobacco Budworm; Grape Berry Moth; Spanworm; Alfalfa Caterpillar; Cotton Bollworm; Head Moth; Amorbia Moth; Omnivorous Looper; Ello Moth (Hornworm); Io Moth; Oleander Moth; Azalea Caterpillar; Hornworm; Leafrollers; Banana Skipper; Batrachedra comosae (Hodges); Thecla Moth; Artichoke Plume Moth; Thistle Butterfly; Bagworm; Spring & Fall Cankerworm; Elm Spanworm; California Oakworm; Pine Butterfly; Spruce Budworms; Saddle Prominent Caterpillar; Douglas Fir Tussock Moth; Western Tussock Moth; Blackheaded Budworm; Mimosa Webworm; Jack Pine Budworm; Saddleback Caterpillar; Greenstriped Mapleworm; or Hemlock Looper.

[1625] In some embodiments, an insect and/or pest may be resistant or at least partially resistant to one or more insecticides can be a Colorado Potato Beetle or an Elm Leaf Beetle.

[1626] In some embodiments, the compositions, combinations, and/or methods of the present invention can be applied to the locus of an insect and/or pest that is resistant or at least partially resistant to one or more insecticides, said insect and/or pest selected from the group consisting of: Achema Sphinx Moth (Hornworm) (Eumorpha achemon); Alfalfa Caterpillar (Colias eurytheme); Almond Moth (Caudra cautella); Amorbia Moth (Amorbia humerosana); Armyworm (Spodoptera spp., e.g. exigua, frugiperda, littoralis, Pseudaletia unipuncta); Artichoke Plume Moth (Platyptilia carduidactyla); Azalea Caterpillar (Datana major); Bagworm (Thyridopteryx); ephemeraeformis); Banana Moth (Hypercompe scribonia); Banana Skipper (Erionota thrax); Blackheaded Budworm (Acleris gloverana); California Oakworm (Phryganidia californica); Spring Cankerworm (Paleacrita merriccata); Cherry Fruitworm (Grapholita packardi); China Mark Moth (Nymphula stagnata); Citrus Cutworm (Xylomyges curialis); Codling Moth (Cydia pomonella); Cranberry Fruitworm (Acrobasis vaccinii); Cross-striped Cabbageworm (Evergestis rimosalis); Cutworm (Noctuid species, Agrotis ipsilon); Douglas Fir Tussock Moth (Orgyia pseudotsugata); Ello Moth (Hornworm) (Erinnyis ello); Elm Spanworm (Ennomos subsignaria); European Grapevine Moth (Lobesia botrana); European Skipper (Thymelicus lineola (Essex Skipper); Fall Webworm (Melissopus latiferreanus; Filbert Leafroller (Archips rosanus; Fruittree Leafroller (Archips argyrospilia; Grape Berry Moth (Paralobesia viteana; Grape Leafroller (Platynota stultana; Grapeleaf Skeletonizer (Harrisina americana (ground only); Green Cloverworm (Plathypena scabra; Greenstriped Mapleworm (Dryocampa rubicunda; Gummosos-Batrachedra; Comosae (Hodges); Gypsy Moth (Lymantria dispar); Hemlock Looper (Lambdina fiscellaria); Hornworm (Manduca spp.); Imported Cabbageworm (Pieris rapae); Io Moth (Automeris io); Jack Pine Budworm (Choristoneura pinus); Light Brown Apple Moth (Epiphyas postvittana); Melonworm (Diaphania hyalinata); Mimosa Webworm (Homadaula anisocentra); Obliquebanded Leafroller (Choristoneura rosaceana); Oleander Moth (Syntomeida epilais); Omnivorous Leafroller (Playnota stultana); Omnivorous Looper (Sabulodes aegrotata); Orangedog (Papilio cresphontes); Orange Tortrix (Argyrotaenia citrana); Oriental Fruit Moth (Grapholita molesta); Peach Twig Borer (Anarsia lineatella); Pine Butterfly (Neophasia menapia); Podworm (Heliocoverpa zea); Redbanded Leafroller (Argyrotaenia velutinana); Redhumped Caterpillar (Schizura concinna); Rindworm Complex (Various Leps.); Saddleback Caterpillar (Sibine stimulea); Saddle Prominent Caterpillar Heterocampa guttivitta); Saltmarsh Caterpillar (Estigmene acrea); Sod Webworm (Crambus spp.); Spanworm (Ennomos subsignaria); Fall Cankerworm (Alsophila pometaria); Spruce Budworm (Choristoneura fumiferana); Tent Caterpillar (Various Lasiocampidae); Thecla-Thecla Basilides (Geyr) Thecla basilides); Tobacco Hornworm (Manduca sexta); Tobacco Moth (Ephestia elutella); Tufted Apple Budmoth (Platynota idaeusalis); Twig Borer (Anarsia lineatella); Variegated Cutworm (Peridroma saucia); Variegated Leafroller (Platynota flavedana); Velvetbean Caterpillar (Anticarsia gemmatalis); Walnut Caterpillar (Datana integerrima); Webworm (Hyphantria cunea); Western Tussock Moth (Orgyia vetusta); Southern Cornstalk Borer (Diatraea crambidoides); Corn Earworm; Sweet potato weevil; Pepper weevil; Citrus root weevil; Strawberry root weevil; Pecan weevil; Filbert weevil; Ricewater weevil; Alfalfa weevil; Clover weevil; Tea shot-hole borer; Root weevil; Sugarcane beetle; Coffee berry borer; Annual blue grass weevil (Listronotus maculicollis); Asiatic garden beetle (Maladera castanea); European chafer (Rhizotroqus majalis); Green June beetle (Cotinis nitida); Japanese beetle (Popillia japonica); May or June beetle (Phyllophaga sp.); Northern masked chafer (Cyclocephala borealis); Oriental beetle (Anomala orientalis); Southern masked chafer (Cyclocephala lurida); Billbug (Curculionoidea); Aedes aegypti; Busseola fusca; Chilo suppressalis; Culex pipiens; Culex quinquefasciatus; Diabrotica virgifera; Diatraea saccharalis; Helicoverpa armigera; Helicoverpa zea; Heliothis virescens; Leptinotarsa decemlineata; Ostrinia furnacalis; Ostrinia nubilalis; Pectinophora gossypiella; Plodia interpunctella; Plutella xylostella; Pseudoplusia includens; Spodoptera exigua; Spodoptera frugiperda; Spodoptera littoralis; Trichoplusia ni; or Xanthogaleruca luteola.

[1627] In some embodiments, the compositions, combinations, and/or methods of the present invention can be applied to the locus of an insect and/or pest that is resistant or at least partially resistant to one or more insecticides, wherein said insect and/or pest is an adult beetle selected from the group consisting of: Asiatic garden beetle (Maladera castanea); Gold spotted oak borer (Agrilus coxalis auroguttatus); Green June beetle (Cotinis nitida); Japanese beetle (Popillia japonica); May or June beetle (Phyllophaga sp.); Oriental beetle (Anomala orientalis); and Soap berry-borer (Agrilus prionurus).

[1628] In some embodiments, the compositions, combinations, and/or methods of the present invention can be applied to the locus of an insect and/or pest that is resistant or at least partially resistant to one or more insecticides, wherein said insect and/or pest is a larvae (annual white grub) selected from the group consisting of: Annual blue grass weevil (Listronotus maculicollis); Asiatic garden beetle (Maladera castanea); European chafer (Rhizotroqus majalis); Green June beetle (Cotinis nitida); Japanese beetle (Popillia japonica); May or June beetle (Phyllophaga sp.); Northern masked chafer (Cyclocephala borealis); Oriental beetle (Anomala orientalis); Southern masked chafer (Cyclocephala lurida); and Billbug (Curculionoidea).

[1629] Bt-Toxin-Resistant Pests

[1630] In some embodiments, an insect and/or pest may be resistant or at least partially resistant to one or more insecticides, for example, one or more Bt toxins. An exemplary description of Bt toxins is disclosed in Adang et al., (2014) Diversity of Bacillus thuringiensis crystal toxins and mechanism of action. In: Dhadialla, Tarlochan and Gill, Sarjeet (eds.) Insect Midgut and Insecticidal Proteins. Advances in Insect Physiology, 47. Academic Press, pp. 39-87; and PCT Application No. WO2009076475, the disclosures of which are incorporated herein by reference in their entirety.

[1631] In some embodiments, an insect and/or pest may be resistant or at least partially resistant to one or more Bt toxins as described herein.

[1632] In some embodiments, an insect and/or pest may be resistant or at least partially resistant to a Bt toxin. For example, in some embodiments, an insect and/or pest may be resistant or at least partially resistant to a Bacillus thuringiensis toxin; Bacillus thuringiensis Cry11Aa protein; Bacillus thuringiensis Cry11Ba protein; Bacillus thuringiensis Cry1Ac protein; Bacillus thuringiensis Cry1A.105 protein; Bacillus thuringiensis Cry1Aa protein; Bacillus thuringiensis Cry1Ab protein; Bacillus thuringiensis Cry1Da protein; Bacillus thuringiensis Cry1F protein; Bacillus thuringiensis Cry2A protein; Bacillus thuringiensis Cry2Ab protein; Bacillus thuringiensis Cry2Ab2 protein; Bacillus thuringiensis Cry2Ae protein; Bacillus thuringiensis Cry4Aa protein; Bacillus thuringiensis Cry4B protein; Bacillus thuringiensis Cry1Aa protein; Bacillus thuringiensis crystal CryIC protein; Bacillus thuringiensis CryIJa protein; Bacillus thuringiensis HD73 spore/crystal protein; Bacillus thuringiensis var. kurstaki HD-1 protein; Bacillus thuringiensis var. tenebrionenis protein; Bacillus thuringiensis var. aizawai protein; Bacillus thuringiensis var. aizawai ATTC SD-1372 protein; Bacillus thuringiensis var. israelensis protein; Bacillus thuringiensis var. kurstaki protein; Bacillus thuringiensis var. kurstaki (Dipel) protein; Bacillus thuringiensis var. kurstaki (Javelin) protein; Bacillus thuringiensis Vip3A protein; Cry1A.105 protein; Cry1 Ah protein; Cry1Ba protein; Cry1C protein; Cry1Ca protein; Cry1Ie protein; Cry2Aa protein; Cry3Bb1 protein; Cry4Ba protein; or Cry11B protein

[1633] In some embodiments, an insect and/or pest that may be resistant or at least partially resistant to a Bt toxin can be selected from the following orders: Culicidae diptera; Chrysomelidae coleoptera; Pyralidae lepidoptera; Gelechiidae lepidoptera; Pyralidae lepidoptera; Plutellidae lepidoptera; or Noctuidae lepidoptera.

[1634] In some embodiments, an insect and/or pest that may be resistant or at least partially resistant to a Bt toxin can be selected from the following species: Aedes aegypti; Busseola fusca; Chilo suppressalis; Culex pipiens; Culex quinquefasciatus; Diabrotica virgifera; Diatraea saccharalis; Helicoverpa armigera; Helicoverpa zea; Heliothis virescens; Leptinotarsa decemlineata; Ostrinia furnacalis; Ostrinia nubilalis; Pectinophora gossypiella; Plodia interpunctella; Plutella xylostella; Pseudoplusia includens; Spodoptera exigua; Spodoptera frugiperda; Spodoptera littoralis; Trichoplusia ni; and Xanthogaleruca luteola.

[1635] In some embodiments, a combination comprising one or more CRIPs (e.g., one or more of CRIPs: A1-A34 in Table A) and one or more IAs (e.g., one or more of IAs: B1-B479 in Table B) can be used to treat any of the foregoing insecticide-resistant insects or Bt-resistant insects.

[1636] Exemplary Combinations and Methods

[1637] In some embodiments, the present invention provides a combination comprising a Cysteine Rich Insecticidal Peptide (CRIP) and an Insecticidal Agent (IA).

[1638] In some embodiments, the present invention provides a combination comprising a Cysteine Rich Insecticidal Peptide (CRIP) and an Insecticidal Agent (IA), wherein the IA is a bacterial toxin; a fungal toxin; a lectin; an Azadirachta indica compound; a boron compound; a virus; or a combination thereof.

[1639] In some embodiments, the bacterial toxin is a Bacillus thuringiensis (Bt) toxin or a Photorhabdus toxin.

[1640] In some embodiments, the Bt toxin is one or more fermentation solids, spores, or toxins isolated from the group consisting of: Bacillus thuringiensis var. kurstaki (Btk); Bacillus thuringiensis var. tenebrionis (Btt); Bacillus thuringiensis var. israelensis (Bti); Bacillus thuringiensis var. aizawai; Bacillus thuringiensis var. aizawai/pacificus; Bacillus thuringiensis var. alesti; Bacillus thuringiensis var. amagiensis; Bacillus thuringiensis var. andalousiensis; Bacillus thuringiensis var. argentinensis; Bacillus thuringiensis var. asturiensis; Bacillus thuringiensis var. azorensis; Bacillus thuringiensis var. balearica; Bacillus thuringiensis var. berliner; Bacillus thuringiensis var. bolivia; Bacillus thuringiensis var. brasilensis; Bacillus thuringiensis var. cameroun; Bacillus thuringiensis var. canadensis; Bacillus thuringiensis var. chanpaisis; Bacillus thuringiensis var. chinensis; Bacillus thuringiensis var. colmeri; Bacillus thuringiensis var. coreanensis; Bacillus thuringiensis var. dakota; Bacillus thuringiensis var. darmstadiensis; Bacillus thuringiensis var. dendrolimus; Bacillus thuringiensis var. entomocidus; Bacillus thuringiensis var. entomocidus/subtoxicus; Bacillus thuringiensis var. finitimus; Bacillus thuringiensis var. fukuokaensis; Bacillus thuringiensis var. galechiae; Bacillus thuringiensis var. galleriae; Bacillus thuringiensis var. graciosensis; Bacillus thuringiensis var. guiyangiensis; Bacillus thuringiensis var. higo; Bacillus thuringiensis var. huazhongensis; Bacillus thuringiensis var. iberica; Bacillus thuringiensis var. indiana; Bacillus thuringiensis var. israelensis/tochigiensis; Bacillus thuringiensis var. japonensis; Bacillus thuringiensis var. jegathesan; Bacillus thuringiensis var. jinghongiensis; Bacillus thuringiensis var. kenyae; Bacillus thuringiensis var. kim; Bacillus thuringiensis var. kumamtoensis; Bacillus thuringiensis var. kunthalanags3; Bacillus thuringiensis var. kunthalaRX24; Bacillus thuringiensis var. kunthalaRX27; Bacillus thuringiensis var. kunthalaRX28; Bacillus thuringiensis var. kyushuensis; Bacillus thuringiensis var. leesis; Bacillus thuringiensis var. londrina; Bacillus thuringiensis var. malayensis; Bacillus thuringiensis var. medellin; Bacillus thuringiensis var. mexicanensis; Bacillus thuringiensis var. mogi; Bacillus thuringiensis var. monterrey; Bacillus thuringiensis var. morrisoni; Bacillus thuringiensis var. muju; Bacillus thuringiensis var. navarrensis; Bacillus thuringiensis var. neoleonensis; Bacillus thuringiensis var. nigeriensis; Bacillus thuringiensis var. novosibirsk; Bacillus thuringiensis var. ostriniae; Bacillus thuringiensis var. oswaldocruzi; Bacillus thuringiensis var. pahangi; Bacillus thuringiensis var. pakistani; Bacillus thuringiensis var. palmanyolensis; Bacillus thuringiensis var. pingluonsis; Bacillus thuringiensis var. pirenaica; Bacillus thuringiensis var. poloniensis; Bacillus thuringiensis var. pondicheriensis; Bacillus thuringiensis var. pulsiensis; Bacillus thuringiensis var. rongseni; Bacillus thuringiensis var. roskildiensis; Bacillus thuringiensis var. san diego; Bacillus thuringiensis var. seoulensis; Bacillus thuringiensis var. shandongiensis; Bacillus thuringiensis var. silo; Bacillus thuringiensis var. sinensis; Bacillus thuringiensis var. sooncheon; Bacillus thuringiensis var. sotto; Bacillus thuringiensis var. sotto/dendrolimus; Bacillus thuringiensis var. subtoxicus; Bacillus thuringiensis var. sumiyoshiensis; Bacillus thuringiensis var. sylvestriensis; Bacillus thuringiensis var. thailandensis; Bacillus thuringiensis var. thompsoni; Bacillus thuringiensis var. thuringiensis; Bacillus thuringiensis var. tochigiensis; Bacillus thuringiensis var. toguchini; Bacillus thuringiensis var. tohokuensis; Bacillus thuringiensis var. tolworthi; Bacillus thuringiensis var. toumanoffi; Bacillus thuringiensis var. vazensis; Bacillus thuringiensis var. wratislaviensis; Bacillus thuringiensis var. wuhanensis; Bacillus thuringiensis var. xiaguangiensis; Bacillus thuringiensis var. yosoo; Bacillus thuringiensis var. yunnanensis; Bacillus thuringiensis var. zhaodongensis; and Bacillus thuringiensis var. konkukian toxin.

[1641] In some embodiments, the Bt toxin is one or more fermentation solids, spores, or toxins isolated from the group consisting of: Bacillus thuringiensis var. kurstaki (Btk); Bacillus thuringiensis var. tenebrionis (Btt); and Bacillus thuringiensis var. israelensis (Bti).

[1642] In some embodiments, the Bt toxin is a parasporal crystal toxin, a secreted protein, a β-exotoxin, a 41.9-kDa insecticidal toxin, a sphaericolysin, an alveolysin, or an enhancin-like protein.

[1643] In some embodiments, the parasporal crystal toxin is a δ-endotoxin.

[1644] In some embodiments, the δ-endotoxin is a Three-domain (3D) Cry family protein, a binary Bin-like family toxin, an ETX_MTX2-like family toxin, a Toxin-10 family toxin, an Aerolysin family toxin, or a cytolysin.

[1645] In some embodiments, the δ-endotoxin is a Three-domain (3D) Cry toxin, a mosquitocidal Cry toxin (Mtx), a binary-like (Bin) toxin, or a Cyt toxin.

[1646] In some embodiments, the δ-endotoxin is a Three-domain (3D) Cry toxin or a Cyt toxin.

[1647] In some embodiments, the δ-endotoxin is selected from the group consisting of: Cry1Aa1, Cry1Aa2, Cry1Aa3, Cry1Aa4, Cry1Aa5, Cry1Aa6, Cry1Aa7, Cry1Aa8, Cry1Aa9, Cry1Aa10, Cry1Aa11, Cry1Aa12, Cry1Aa13, Cry1Aa14, Cry1Aa15, Cry1Aa16, Cry1Aa17, Cry1Aa18, Cry1Aa19, Cry1Aa20, Cry1Aa21, Cry1Aa22, Cry1Aa23, Cry1Aa24, Cry1Aa25, Cry1Ab1, Cry1Ab2, Cry1Ab3, Cry1Ab4, Cry1Ab5, Cry1Ab6, Cry1Ab7, Cry1Ab8, Cry1Ab9, Cry1Ab10, Cry1Ab11, Cry1Ab12, Cry1Ab13, Cry1Ab14, Cry1Ab15, Cry1Ab16, Cry1Ab17, Cry1Ab18, Cry1Ab19, Cry1Ab20, Cry1Ab21, Cry1Ab22, Cry1Ab23, Cry1Ab24, Cry1Ab25, Cry1Ab26, Cry1Ab27, Cry1Ab28, Cry1Ab29, Cry1Ab30, Cry1Ab31, Cry1Ab32, Cry1Ab33, Cry1Ab34, Cry1Ab35, Cry1Ab36, Cry1Ab-like, Cry1Ab-like, Cry1Ab-like, Cry1Ab-like, Cry1Ac1, Cry1Ac2, Cry1Ac3, Cry1Ac4, Cry1Ac5, Cry1Ac6, Cry1Ac7, Cry1Ac8, Cry1Ac9, Cry1Ac10, Cry1Ac11, Cry1Ac12, Cry1Ac13, Cry1Ac14, Cry1Ac15, Cry1Ac16, Cry1Ac17, Cry1Ac18, Cry1Ac19, Cry1Ac20, Cry1Ac21, Cry1Ac22, Cry1Ac23, Cry1Ac24, Cry1Ac25, Cry1Ac26, Cry1Ac27, Cry1Ac28, Cry1Ac29, Cry1Ac30, Cry1Ac31, Cry1Ac32, Cry1Ac33, Cry1Ac34, Cry1Ac35, Cry1Ac36, Cry1Ac37, Cry1Ac38, Cry1Ac39, Cry1Ad1, Cry1Ad2, Cry1Ae1, Cry1Af1, Cry1Ag1, Cry1Ah1, Cry1Ah2, Cry1Ah3, Cry1Ai1, Cry1Ai2, Cry1Aj1, Cry1A-like, Cry1Ba1, Cry1Ba2, Cry1Ba3, Cry1Ba4, Cry1Ba5, Cry1Ba6, Cry1Ba7, Cry1Ba8, Cry1Bb1, Cry1Bb2, Cry1Bb3, Cry1Bc1, Cry1Bd1, Cry1Bd2, Cry1Bd3, Cry1Be1, Cry1Be2, Cry1Be3, Cry1Be4, Cry1Be5, Cry1Bf1, Cry1Bf2, Cry1Bg1, Cry1Bh1, Cry1Bi1, Cry1Bj1, Cry1Ca1, Cry1Ca2, Cry1Ca3, Cry1Ca4, Cry1Ca5, Cry1Ca6, Cry1Ca7, Cry1Ca8, Cry1Ca9, Cry1Ca10, Cry1Ca11, Cry1Ca12, Cry1Ca13, Cry1Ca14, Cry1Ca15, Cry1Cb1, Cry1Cb2, Cry1Cb3, Cry1Cb-like, Cry1Da1, Cry1Da2, Cry1Da3, Cry1Da4, Cry1Da5, Cry1db1, Cry1db2, Cry1Dc1, Cry1Dd1, Cry1Ea1, Cry1Ea2, Cry1Ea3, Cry1Ea4, Cry1Ea5, Cry1Ea6, Cry1Ea7, Cry1Ea8, Cry1Ea9, Cry1Ea10, Cry1Ea11, Cry1Ea12, Cry1Eb1, Cry1Fa1, Cry1Fa2, Cry1Fa3, Cry1Fa4, Cry1Fb1, Cry1Fb2, Cry1Fb3, Cry1Fb4, Cry1Fb5, Cry1Fb6, Cry1Fb7, Cry1Ga1, Cry1Ga2, Cry1Gb1, Cry1Gb2, Cry1Gc1, Cry1Ha1, Cry1Hb1, Cry1Hb2, Cry1Hc1, Cry1H-like, Cry1Ia1, Cry1Ia2, Cry1Ia3, Cry1Ia4, Cry1Ia5, Cry1Ia6, Cry1Ia7, Cry1Ia8, Cry1Ia9, Cry1Ia10, Cry1Ia11, Cry1Ia12, Cry1Ia13, Cry1Ia14, Cry1Ia15, Cry1Ia16, Cry1Ia17, Cry1Ia18, Cry1Ia19, Cry1Ia20, Cry1Ia21, Cry1Ia22, Cry1Ia23, Cry1Ia24, Cry1Ia25, Cry1Ia26, Cry1Ia27, Cry1Ia28, Cry1Ia29, Cry1Ia30, Cry1Ia31, Cry1Ia32, Cry1Ia33, Cry1Ia34, Cry1Ia35, Cry1Ia36, Cry1Ia37, Cry1Ia38, Cry1Ia39, Cry1Ia40, Cry1Ib1, Cry1Ib2, Cry1Ib3, Cry1Ib4, Cry1Ib5, Cry1Ib6, Cry1Ib7, Cry1Ib8, Cry1Ib9, Cry1Ib10, Cry1Ib11, Cry1Ic1, Cry1Ic2, Cry1Id1, Cry1Id2, Cry1Id3, Cry1Ie1, Cry1Ie2, Cry1Ie3, Cry1Ie4, Cry1Ie5, Cry1If1, Cry1Ig1, Cry1I-like, Cry1I-like, Cry1Ja1, Cry1Ja2, Cry1Ja3, Cry1Jb1, Cry1Jc1, Cry1Jc2, Cry1Jd1, Cry1Ka1, Cry1Ka2, Cry1La1, Cry1La2, Cry1La3, Cry1Ma1, Cry1Ma2, Cry1Na1, Cry1Na2, Cry1Na3, Cry1Nb1, Cry1-like, Cry2Aa1, Cry2Aa2, Cry2Aa3, Cry2Aa4, Cry2Aa5, Cry2Aa6, Cry2Aa7, Cry2Aa8, Cry2Aa9, Cry2Aa10, Cry2Aa11, Cry2Aa12, Cry2Aa13, Cry2Aa14, Cry2Aa15, Cry2Aa16, Cry2Aa17, Cry2Aa18, Cry2Aa19, Cry2Aa20, Cry2Aa21, Cry2Aa22, Cry2Aa23, Cry2Aa23, Cry2Aa25, Cry2Ab1, Cry2Ab2, Cry2Ab3, Cry2Ab4, Cry2Ab5, Cry2Ab6, Cry2Ab7, Cry2Ab8, Cry2Ab9, Cry2Ab10, Cry2Ab11, Cry2Ab12, Cry2Ab13, Cry2Ab14, Cry2Ab15, Cry2Ab16, Cry2Ab17, Cry2Ab18, Cry2Ab19, Cry2Ab20, Cry2Ab21, Cry2Ab22, Cry2Ab23, Cry2Ab24, Cry2Ab25, Cry2Ab26, Cry2Ab27, Cry2Ab28, Cry2Ab29, Cry2Ab30, Cry2Ab31, Cry2Ab32, Cry2Ab33, Cry2Ab34, Cry2Ab35, Cry2Ab36, Cry2Ac1, Cry2Ac2, Cry2Ac3, Cry2Ac4, Cry2Ac5, Cry2Ac6, Cry2Ac7, Cry2Ac8, Cry2Ac9, Cry2Ac10, Cry2Ac11, Cry2Ac12, Cry2Ad1, Cry2Ad2, Cry2Ad3, Cry2Ad4, Cry2Ad5, Cry2Ae1, Cry2Af1, Cry2Af2, Cry2Ag1, Cry2Ah1, Cry2Ah2, Cry2Ah3, Cry2Ah4, Cry2Ah5, Cry2Ah6, Cry2Ai1, Cry2Aj1, Cry2Ak1, Cry2A11, Cry2Ba1, Cry2Ba2, Cry3Aa1, Cry3Aa2, Cry3Aa3, Cry3Aa4, Cry3Aa5, Cry3Aa6, Cry3Aa7, Cry3Aa8, Cry3Aa9, Cry3Aa10, Cry3Aa11, Cry3Aa12, Cry3Ba1, Cry3Ba2, Cry3Ba3, Cry3Bb1, Cry3Bb2, Cry3Bb3, Cry3Ca1, Cry4Aa1, Cry4Aa2, Cry4Aa3, Cry4Aa4, Cry4A-like, Cry4Ba1, Cry4Ba2, Cry4Ba3, Cry4Ba4, Cry4Ba5, Cry4Ba-like, Cry4Ca1, Cry4Ca2, Cry4Cb1, Cry4Cb2, Cry4Cb3, Cry4Cc1, Cry5Aa1, Cry5Ab1, Cry5Ac1, Cry5Ad1, Cry5Ba1, Cry5Ba2, Cry5Ba3, Cry5Ca1, Cry5Ca2, Cry5Da1, Cry5Da2, Cry5Ea1, Cry5Ea2, Cry6Aa1, Cry6Aa2, Cry6Aa3, Cry6Ba1, Cry7Aa1, Cry7Aa2, Cry7Ab1, Cry7Ab2, Cry7Ab3, Cry7Ab4, Cry7Ab5, Cry7Ab6, Cry7Ab7, Cry7Ab8, Cry7Ab9, Cry7Ac1, Cry7Ba1, Cry7Bb1, Cry7Ca1, Cry7Cb1, Cry7Da1, Cry7Da2, Cry7Da3, Cry7Ea1, Cry7Ea2, Cry7Ea3, Cry7Fa1, Cry7Fa2, Cry7Fb1, Cry7Fb2, Cry7Fb3, Cry7Ga1, Cry7Ga2, Cry7Gb1, Cry7Gc1, Cry7Gd1, Cry7Ha1, Cry7Ia1, Cry7Ja1, Cry7Ka1, Cry7Kb1, Cry7La1, Cry8Aa1, Cry8Ab1, Cry8Ac1, Cry8Ad1, Cry8Ba1, Cry8Bb1, Cry8Bc1, Cry8Ca1, Cry8Ca2, Cry8Ca3, Cry8Ca4, Cry8Ca5, Cry8Da1, Cry8Da2, Cry8Da3, Cry8db1, Cry8Ea1, Cry8Ea2, Cry8Ea3, Cry8Ea4, Cry8Ea5, Cry8Ea6, Cry8Fa1, Cry8Fa2, Cry8Fa3, Cry8Fa4, Cry8Ga1, Cry8Ga2, Cry8Ga3, Cry8Ha1, Cry8Hb1, Cry8Ia1, Cry8Ia2, Cry8Ia3, Cry8Ia4, Cry8Ib1, Cry8Ib2, Cry8Ib3, Cry8Ja1, Cry8Ka1, Cry8Ka2, Cry8Ka3, Cry8Kb1, Cry8Kb2, Cry8Kb3, Cry8La1, Cry8Ma1, Cry8Ma2, Cry8Ma3, Cry8Na1, Cry8Pa1, Cry8Pa2, Cry8Pa3, Cry8Qa1, Cry8Qa2, Cry8Ra1, Cry8Sa1, Cry8Ta1, Cry8-like, Cry8-like, Cry9Aa1, Cry9Aa2, Cry9Aa3, Cry9Aa4, Cry9Aa5, Cry9Aa, like, Cry9Ba1, Cry9Ba2, Cry9Bb1, Cry9Ca1, Cry9Ca2, Cry9Cb1, Cry9Da1, Cry9Da2, Cry9Da3, Cry9Da4, Cry9db1, Cry9Dc1, Cry9Ea1, Cry9Ea2, Cry9Ea3, Cry9Ea4, Cry9Ea5, Cry9Ea6, Cry9Ea7, Cry9Ea8, Cry9Ea9, Cry9Ea10, Cry9Ea11, Cry9Eb1, Cry9Eb2, Cry9Eb3, Cry9Ec1, Cry9Ed1, Cry9Ee1, Cry9Ee2, Cry9Fa1, Cry9Ga1, Cry9-like, Cry10Aa1, Cry10Aa2, Cry10Aa3, Cry10Aa4, Cry10A-like, Cry11Aa1, Cry11Aa2, Cry11Aa3, Cry11Aa4, Cry11Aa5, Cry11Aa-like, Cry11Ba1, Cry11Bb1, Cry11Bb2, Cry12Aa1, Cry13Aa1, Cry13Aa2, Cry14Aa1, Cry14Ab1, Cry15Aa1, Cry16Aa1, Cry17Aa1, Cry18Aa1, Cry18Ba1, Cry18Ca1, Cry19Aa1, Cry19Ba1, Cry19Ca1, Cry20Aa1, Cry20Ba1, Cry20Ba2, Cry20-like, Cry21Aa1, Cry21Aa2, Cry21Aa3, Cry21Ba1, Cry21Ca1, Cry21Ca2, Cry21Da1, Cry21Ea1, Cry21Fa1, Cry21Ga1, Cry21Ha1, Cry22Aa1, Cry22Aa2, Cry22Aa3, Cry22Ab1, Cry22Ab2, Cry22Ba1, Cry22Bb1, Cry23Aa1, Cry24Aa1, Cry24Ba1, Cry24Ca1, Cry24Da1, Cry25Aa1, Cry26Aa1, Cry27Aa1, Cry28Aa1, Cry28Aa2, Cry29Aa1, Cry29Ba1, Cry30Aa1, Cry30Ba1, Cry30Ca1, Cry30Ca2, Cry30Da1, Cry30db1, Cry30Ea1, Cry30Ea2, Cry30Ea3, Cry30Ea4, Cry30Fa1, Cry30Ga1, Cry30Ga2, Cry31Aa1, Cry31Aa2, Cry31Aa3, Cry31Aa4, Cry31Aa5, Cry31Aa6, Cry31Ab1, Cry31Ab2, Cry31Ac1, Cry31Ac2, Cry31Ad1, Cry31Ad2, Cry32Aa1, Cry32Aa2, Cry32Ab1, Cry32Ba1, Cry32Ca1, Cry32Cb1, Cry32Da1, Cry32Ea1, Cry32Ea2, Cry32Eb1, Cry32Fa1, Cry32Ga1, Cry32Ha1, Cry32Hb1, Cry32Ia1, Cry32Ja1, Cry32Ka1, Cry32La1, Cry32Ma1, Cry32Mb1, Cry32Na1, Cry32Oa1, Cry32Pa1, Cry32Qa1, Cry32Ra1, Cry32Sa1, Cry32Ta1, Cry32Ua1, Cry32Va1, Cry32Wa1, Cry32Wa2, Cry32Xa1, Cry32Ya1, Cry33Aa1, Cry34Aa1, Cry34Aa2, Cry34Aa3, Cry34Aa4, Cry34Ab1, Cry34Ac1, Cry34Ac2, Cry34Ac3, Cry34Ba1, Cry34Ba2, Cry34Ba3, Cry35Aa1, Cry35Aa2, Cry35Aa3, Cry35Aa4, Cry35Ab1, Cry35Ab2, Cry35Ab3, Cry35Ac1, Cry35Ba1, Cry35Ba2, Cry35Ba3, Cry36Aa1, Cry37Aa1, Cry38Aa1, Cry39Aa1, Cry40Aa1, Cry40Ba1, Cry40Ca1, Cry40Da1, Cry41Aa1, Cry41Ab1, Cry41Ba1, Cry41Ba2, Cry41Ca1, Cry42Aa1, Cry43Aa1, Cry43Aa2, Cry43Ba1, Cry43Ca1, Cry43Cb1, Cry43Cc1, Cry43-like, Cry44Aa1, Cry45Aa1, Cry45Ba1, Cry46Aa1, Cry46Aa2, Cry46Ab1, Cry47Aa1, Cry48Aa1, Cry48Aa2, Cry48Aa3, Cry48Ab1, Cry48Ab2, Cry49Aa1, Cry49Aa2, Cry49Aa3, Cry49Aa4, Cry49Ab1, Cry50Aa1, Cry50Ba1, Cry50Ba2, Cry51Aa1, Cry51Aa2, Cry52Aa1, Cry52Ba1, Cry52Ca1, Cry53Aa1, Cry53Ab1, Cry54Aa1, Cry54Aa2, Cry54Ab1, Cry54Ba1, Cry54Ba2, Cry55Aa1, Cry55Aa2, Cry55Aa3, Cry56Aa1, Cry56Aa2, Cry56Aa3, Cry56Aa4, Cry57Aa1, Cry57Ab1, Cry58Aa1, Cry59Ba1, Cry59Aa1, Cry60Aa1, Cry60Aa2, Cry60Aa3, Cry60Ba1, Cry60Ba2, Cry60Ba3, Cry61Aa1, Cry61Aa2, Cry61Aa3, Cry62Aa1, Cry63Aa1, Cry64Aa1, Cry64Ba1, Cry64Ca1, Cry65Aa1, Cry65Aa2, Cry66Aa1, Cry66Aa2, Cry67Aa1, Cry67Aa2, Cry68Aa1, Cry69Aa1, Cry69Aa2, Cry69Ab1, Cry70Aa1, Cry70Ba1, Cry70Bb1, Cry71Aa1, Cry72Aa1, Cry72Aa2, Cry73Aa1, Cry74Aa, Cry75Aa1, Cry75Aa2, Cry75Aa3, Cry76Aa1, Cry77Aa1, or Cry78Aa1, Cyt1Aa1, Cyt1Aa2, Cyt1Aa3, Cyt1Aa4, Cyt1Aa5, Cyt1Aa6, Cyt1Aa7, Cyt1Aa8, Cyt1Aa-like, Cyt1Ab1, Cyt1Ba1, Cyt1Ca1, Cyt1Da1, Cyt1Da2, Cyt2Aa1, Cyt2Aa2, Cyt2Aa3, Cyt2Aa4, Cyt2Ba1, Cyt2Ba2, Cyt2Ba3, Cyt2Ba4, Cyt2Ba5, Cyt2Ba6, Cyt2Ba7, Cyt2Ba8, Cyt2Ba9, Cyt2Ba10, Cyt2Ba11, Cyt2Ba12, Cyt2Ba13, Cyt2Ba14, Cyt2Ba15, Cyt2Ba16, Cyt2Ba-like, Cyt2Bb1, Cyt2Bc1, Cyt2B-like, Cyt2Ca1, and Cyt3Aa1.

[1648] In some embodiments, the Cry toxin or Cyt toxin has an amino acid sequence according to SEQ ID NOs: 412-481.

[1649] In some embodiments, the Bt toxin is a secreted protein.

[1650] In some embodiments, the secreted protein is a vegetative insecticidal protein (Vip), a secreted insecticidal protein (Sip), a Bin-like family protein, or an ETX_MTX2-family protein.

[1651] In some embodiments, the secreted protein is a Vip.

[1652] In some embodiments, the Vip is a Vip 1 family protein, a Vip 2 family protein, a Vip 3 family protein, or a Vip 4 family protein.

[1653] In some embodiments, the Vip is selected from the group consisting of: Vip1Aa1, Vip1Aa2, Vip1Aa3, Vip1Ab1, Vip1Ac1, Vip1Ad1, Vip1Ba1, Vip1Ba2, Vip1Bb1, Vip1Bb2, Vip1Bb3, Vip1Bc1, Vip1Ca1, Vip1Ca2, Vip1Da1, Vip2Aa1, Vip2Aa2, Vip2Aa3, Vip2Ab1, Vip2Ac1, Vip2Ac2, Vip2Ad1, Vip2Ae1, Vip2Ae2, Vip2Ae3, Vip2Af1, Vip2Af2, Vip2Ag1, Vip2Ag2, Vip2Ba1, Vip2Ba2, Vip2Bb1, Vip2Bb2, Vip2Bb3, Vip2Bb4, Vip3Aa1, Vip3Aa2, Vip3Aa3, Vip3Aa4, Vip3Aa5, Vip3Aa6, Vip3Aa7, Vip3Aa8, Vip3Aa9, Vip3Aa10, Vip3Aa11, Vip3Aa12, Vip3Aa13, Vip3Aa14, Vip3Aa15, Vip3Aa16, Vip3Aa17, Vip3Aa18, Vip3Aa19.0, Vip3Aa19, Vip3Aa20, Vip3Aa21, Vip3Aa22, Vip3Aa23, Vip3Aa24, Vip3Aa25, Vip3Aa26, Vip3Aa27, Vip3Aa28, Vip3Aa29, Vip3Aa30, Vip3Aa31, Vip3Aa32, Vip3Aa33, Vip3Aa34, Vip3Aa35, Vip3Aa36, Vip3Aa37, Vip3Aa38, Vip3Aa39, Vip3Aa40, Vip3Aa41, Vip3Aa42, Vip3Aa43, Vip3Aa44, Vip3Aa45, Vip3Aa46, Vip3Aa47, Vip3Aa48, Vip3Aa49, Vip3Aa50, Vip3Aa51, Vip3Aa52, Vip3Aa53, Vip3Aa54, Vip3Aa55, Vip3Aa56, Vip3Aa57, Vip3Aa58, Vip3Aa59, Vip3Aa60, Vip3Aa61, Vip3Aa62, Vip3Aa63, Vip3Aa64, Vip3Aa65, Vip3Aa66, Vip3Ab1, Vip3Ab2, Vip3Ac1, Vip3Ad1, Vip3Ad2, Vip3Ad3, Vip3Ad4, Vip3Ad5, Vip3Ad6, Vip3Ae1, Vip3Af1, Vip3Af2, Vip3Af3, Vip3Af4, Vip3Ag1, Vip3Ag2, Vip3Ag3, Vip3Ag4, Vip3Ag5, Vip3Ag6, Vip3Ag7, Vip3Ag8, Vip3Ag9, Vip3Ag10, Vip3Ag11, Vip3Ag12, Vip3Ag13, Vip3Ag14, Vip3Ag15, Vip3Ah1, Vip3Ah2, Vip3Ai1, Vip3Aj1, Vip3Aj2, Vip3Ba1, Vip3Ba2, Vip3Bb1, Vip3Bb2, Vip3Bb3, Vip3Bc, Vip3Ca1, Vip3Ca2, Vip3Ca3, Vip3Ca4, and Vip4Aa1.

[1654] In some embodiments, the Vip protein has an amino acid sequence according to the amino acid sequence set forth in SEQ ID NOs: 482-587.

[1655] In some embodiments, the bacterial toxin is a Photorhabdus toxin.

[1656] In some embodiments, the Photorhabdus toxin is selected from the group consisting of: a Photorhabdus akhurstii toxin; a Photorhabdus asymbiotica toxin; a Photorhabdus asymbiotica subsp. asymbiotica toxin; a Photorhabdus asymbiotica subsp. asymbiotica ATCC 43949 toxin; a Photorhabdus australis toxin; a Photorhabdus australis DSM 17609 toxin; a Photorhabdus bodei toxin; a Photorhabdus caribbeanensis toxin; a Photorhabdus cinerea toxin; a Photorhabdus hainanensis toxin; a Photorhabdus heterorhabditis toxin; a Photorhabdus kayaii toxin; a Photorhabdus khanii toxin; a Photorhabdus khanii NC19 toxin; a Photorhabdus khanii subsp. guanajuatensis toxin; a Photorhabdus kleinii toxin; a Photorhabdus laumondii toxin; a Photorhabdus laumondii subsp. clarkei toxin; a Photorhabdus laumondii subsp. laumondii toxin; a Photorhabdus laumondii subsp. laumondii TTO1 toxin; a Photorhabdus luminescens toxin; a Photorhabdus luminescens BA1 toxin; a Photorhabdus luminescens NBAII H75HRPL105 toxin; a Photorhabdus luminescens NBAII HiPL101 toxin; a Photorhabdus luminescens subsp. luminescens toxin; a Photorhabdus luminescens subsp. luminescens ATCC 29999 toxin; a Photorhabdus luminescens subsp. mexicana toxin; a Photorhabdus luminescens subsp. sonorensis toxin; a Photorhabdus namnaonensis toxin; a Photorhabdus noenieputensis toxin; a Photorhabdus stackebrandtii toxin; a Photorhabdus tasmaniensis toxin; a Photorhabdus temperata toxin; a Photorhabdus temperata J3 toxin; a Photorhabdus temperata subsp. phorame toxin; a Photorhabdus temperata subsp. temperata toxin; a Photorhabdus temperata subsp. temperata M1021 toxin; a Photorhabdus temperata subsp. temperata Meg1 toxin; a Photorhabdus thracensis toxin; a unclassified Photorhabdus toxin; a Photorhabdus sp. toxin; a Photorhabdus sp. 3014 toxin; a Photorhabdus sp. 3240 toxin; a Photorhabdus sp. Az29 toxin; a Photorhabdus sp. BS21 toxin; a Photorhabdus sp. CbKj163 toxin; a Photorhabdus sp. CRCIA-P01 toxin; a Photorhabdus sp. ENY toxin; a Photorhabdus sp. FL2122 toxin; a Photorhabdus sp. FL480 toxin; a Photorhabdus sp. FsIw96 toxin; a Photorhabdus sp. GDd233 toxin; a Photorhabdus sp. H3086 toxin; a Photorhabdus sp. H3107 toxin; a Photorhabdus sp. H3240 toxin; a Photorhabdus sp. HB301 toxin; a Photorhabdus sp. HB78 toxin; a Photorhabdus sp. HB89 toxin; a Photorhabdus sp. HIT toxin; a Photorhabdus sp. HO1 toxin; a Photorhabdus sp. HUG-39 toxin; a Photorhabdus sp. IT toxin; a Photorhabdus sp. JUN toxin; a Photorhabdus sp. KcTs129 toxin; a Photorhabdus sp. KJ13.1 TH toxin; a Photorhabdus sp. KJ14.3 TH toxin; a Photorhabdus sp. KJ24.5 TH toxin; a Photorhabdus sp. KJ29.1 TH toxin; a Photorhabdus sp. KJ37.1 TH toxin; a Photorhabdus sp. KJ7.1 TH toxin; a Photorhabdus sp. KJ8.2 TH toxin; a Photorhabdus sp.

[1657] KJ9.1 TH toxin; a Photorhabdus sp. KJ9.2 TH toxin; a Photorhabdus sp. KK1.3 TH toxin; a Photorhabdus sp. KK1.4 TH toxin; a Photorhabdus sp. KMD74 toxin; a Photorhabdus sp. KOH toxin; a Photorhabdus sp. MID10 toxin; a Photorhabdus sp. MOL toxin; a Photorhabdus sp. MSW 058 toxin; a Photorhabdus sp. MSW 079 toxin; a Photorhabdus sp. NK2.1 TH toxin; a Photorhabdus sp. NK2.5 TH toxin; a Photorhabdus sp. NnMt2h toxin; a Photorhabdus sp. NP1 toxin; a Photorhabdus sp. OH10 toxin; a Photorhabdus sp. OnIr40 toxin; a Photorhabdus sp. OnKn2 toxin; a Photorhabdus sp. PB10.1 TH toxin; a Photorhabdus sp. PB16.3 TH toxin; a Photorhabdus sp. PB17.1 TH toxin; a Photorhabdus sp. PB17.3 TH toxin; a Photorhabdus sp. PB2.5 TH toxin; a Photorhabdus sp. PB22.4 TH toxin; a Photorhabdus sp. PB22.5 TH toxin; a Photorhabdus sp. PB32.1 TH toxin; a Photorhabdus sp. PB33.1 TH toxin; a Photorhabdus sp. PB33.4 TH toxin; a Photorhabdus sp. PB37.4 TH toxin; a Photorhabdus sp. PB39.2 TH toxin; a Photorhabdus sp. PB4.5 TH toxin; a Photorhabdus sp. PB41.4 TH toxin; a Photorhabdus sp. PB45.5 TH toxin; a Photorhabdus sp. PB47.1 TH toxin; a Photorhabdus sp. PB47.3 TH toxin; a Photorhabdus sp. PB5.1 TH toxin; a Photorhabdus sp. PB5.4 TH toxin; a Photorhabdus sp. PB50.4 TH toxin; a Photorhabdus sp. PB51.4 TH toxin; a Photorhabdus sp. PB52.2 TH toxin; a Photorhabdus sp. PB54.4 TH toxin; a Photorhabdus sp. PB58.2 TH toxin; a Photorhabdus sp. PB58.4 TH toxin; a Photorhabdus sp. PB58.5 TH toxin; a Photorhabdus sp. PB59.2 TH toxin; a Photorhabdus sp. PB6.5 TH toxin; a Photorhabdus sp. PB67.2 TH toxin; a Photorhabdus sp. PB67.4 TH toxin; a Photorhabdus sp. PB68.1 TH toxin; a Photorhabdus sp. PB7.5 TH toxin; a Photorhabdus sp. PB76.1 TH toxin; a Photorhabdus sp. PB76.4 TH toxin; a Photorhabdus sp. PB76.5 TH toxin; a Photorhabdus sp. PB78.2 TH toxin; a Photorhabdus sp. PB80.3 TH toxin; a Photorhabdus sp. PB80.4 TH toxin; a Photorhabdus sp. Pjun toxin; a Photorhabdus sp. RW14-46 toxin; a Photorhabdus sp. S10-54 toxin; a Photorhabdus sp. S12-55 toxin; a Photorhabdus sp. S14-60 toxin; a Photorhabdus sp. S15-56 toxin; a Photorhabdus sp. S5P8-50 toxin; a Photorhabdus sp. S7-51 toxin; a Photorhabdus sp. S8-52 toxin; a Photorhabdus sp. S9-53 toxin; a Photorhabdus sp. SJ2 toxin; a Photorhabdus sp. SN259 toxin; a Photorhabdus sp. SP1.5 TH toxin; a Photorhabdus sp. SP16.4 TH toxin; a Photorhabdus sp. SP21.5 TH toxin; a Photorhabdus sp. SP3.4 TH toxin; a Photorhabdus sp. SP4.5 TH toxin; a Photorhabdus sp. SP7.3 TH toxin; a Photorhabdus sp. TyKb140 toxin; a Photorhabdus sp. UK76 toxin; a Photorhabdus sp. VMG toxin; a Photorhabdus sp. WA21C toxin; a Photorhabdus sp. WkSs43 toxin; a Photorhabdus sp. Wx13 toxin; a Photorhabdus sp. X₄ toxin; a Photorhabdus sp. YNb90 toxin; a and a Photorhabdus sp. ZM toxin.

[1658] In some embodiments, the Photorhabdus toxin is a Photorhabdus luminescens toxin.

[1659] In some embodiments, the fungal toxin is an Ascomycete fungal toxin.

[1660] In some embodiments, the Ascomycete fungal toxin is a Cordycipitaceae family fungal toxin.

[1661] In some embodiments, the Cordycipitaceae fungal toxin is a Akanthomyces toxin; a Ascopolyporus toxin; a Beauveria toxin; a Beejasamuha toxin; a Cordyceps toxin; a Coremiopsis toxin; a Engyodontium toxin; a Gibellula toxin; a Hyperdermium toxin; a Insecticola toxin; a Isaria toxin; a Lecanicillium toxin; a Microhilum toxin; a Phytocordyceps toxin; a Pseudogibellula toxin; a Rotiferophthora toxin; a Simplicillium toxin; or a Torrubiella toxin.

[1662] In some embodiments, the Cordycipitaceae fungal toxin is a Beauveria toxin.

[1663] In some embodiments, the Beauveria toxin is a Beauveria alba toxin; a Beauveria amorpha toxin; a Beauveria arenaria toxin; a Beauveria asiatica toxin; a Beauveria australis toxin; a Beauveria bassiana toxin; a Cordyceps bassiana toxin; a Beauveria brongniartii toxin; a Beauveria brumptii toxin; a Beauveria caledonica toxin; a Beauveria chiromensis toxin; a Beauveria coccorum toxin; a Beauveria cretacea toxin; a Beauveria cylindrospora toxin; a Beauveria delacroixii toxin; a Beauveria densa toxin; a Beauveria dependens toxin; a Beauveria doryphorae toxin; a Beauveria effusa toxin; a Beauveria epigaea toxin; a Beauveria felina toxin; a Beauveria geodes toxin; a Beauveria globulifera toxin; a Beauveria heimii toxin; a Beauveria hoplocheli toxin; a Beauveria kipukae toxin; a Beauveria taxa toxin; a Beauveria malawiensis toxin; a Beauveria medogensis toxin; a Beauveria melolonthae toxin; a Beauveria nubicola toxin; a Beauveria oryzae toxin; a Beauveria paradoxa toxin; a Beauveria paranensis toxin; a Beauveria parasitica toxin; a Beauveria petelotii toxin; a Beauveria pseudobassiana toxin; a Beauveria rileyi toxin; a Beauveria rubra toxin; a Beauveria shiotae toxin; a Beauveria sobolifera toxin; a Beauveria spicata toxin; a Beauveria stephanoderis toxin; a Beauveria sulfurescens toxin; a Beauveria sungii toxin; a Beauveria tenella toxin; a Beauveria tundrensis toxin; a Beauveria velata toxin; a Beauveria varroae toxin; a Beauveria vermiconia toxin; a Beauveria vexans toxin; a Beauveria viannai toxin; or a Beauveria virella toxin.

[1664] In some embodiments, the lectin is selected from the group consisting of: Galanthus nivalis agglutinin (GNA); Sambucus nigra lectin (SNA); Maackia amurensis-II (MAL-II); Erythrina cristagalli lectin (ECL); Ricinus communis agglutinin-I (RCA); peanut agglutinin (PNA); wheat germ agglutinin (WGA); Griffonia simplicifolia-II (GSL-II); Con A; Lens culinaris agglutinin (LCA); Mannose-binding lectin (MBL); BanLec; galectins; Phaseolus vulgaris Leucoagglutinin (PHA-L); Phaseolus vulgaris Erythroagglutinin (PHA-E); and Datura stramonium Lectin (DSL).

[1665] In some embodiments, the lectin is GNA.

[1666] In some embodiments, the Azadirachta indica compound is an Azadirachtin; an Azadiradione; an Azadiradionolide; a Deacetylgedunin; a Deacetylazadirachtinol; a Desfuranoazadiradione; a Epoxyazadiradione; a Gedunin; a Mahmoodin; a Neemfruitin A; a Neemfruitin B; a Nimbolide; a Nimbin; a Nimolicinol; an Ohchinin Acetate; a Salannin; a Salannol; an alpha-Nimolactone; a beta-Nimolactone; a 2′,3′-Dihydrosalannin; a 3-Deacetylsalannin; a 6-Deacetylnimbin; a 7-Acetyl-16,17-dehydro-16-hydroxyneotrichilenone; a 7-Benzoylnimbocinol; a 7-Deacetyl-7-benzoylepoxyazadiradione; a 7-Deacetyl-7-benzoylgedunin; a 7-Deacetyl-17-epinimolicinol; a 15-Hydroxyazadiradione; a 17-Epi-17-Hydroxyazadiradione; a 17-Epiazadiradione; a 20,21,22,23-Tetrahydro-23-oxoazadirone; a 22,23-Dihydronimocinol; or a 28-Deoxonimbolide.

[1667] In some embodiments, the boron compound is selected from the group consisting of: borax, boric acid, disodium octaborate, sodium borate, sodium metaborate, sodium tetraborate decahydrate, boron oxide, boron carbide, boron nitride, boron tribromide, boron trichloride, and boron trifluoride.

[1668] In some embodiments, the virus is a Baculoviridae virus.

[1669] In some embodiments, the Baculoviridae virus is a Betabaculovirus.

[1670] In some embodiments, the Betabaculovirus is a Adoxophyes orana granulovirus; a Agrotis segetum granulovirus; a Artogeia rapae granulovirus; a Pieris brassicae granulovirus; a Choristoneura fumiferana granulovirus; a Choristoneura occidentalis granulovirus; a Clostera anachoreta granulovirus; a Clostera anastomosis granulovirus A; a Clostera anastomosis granulovirus Henan; a Clostera anastomosis granulovirus B; a Cnaphalocrocis medinalis granulovirus; a Cryptophlebia leucotreta granulovirus; a Cydia pomonella granulovirus; a Cydia pomonella granulosis virus (isolate Mexican); a Diatraea saccharalis granulovirus; a Epinotia aporema granulovirus; a Erinnyis ello granulovirus; a Harrisina brillians granulovirus; a Helicoverpa armigera granulovirus; a Lacanobia oleracea granulovirus; a Mods latipes granulovirus; a Mythimna unipuncta granulovirus A; a Pseudalatia unipuncta granulovirus; a Mythimna unipuncta granulovirus B; a Mythimna unipuncta granulovirus; a Phthorimaea operculella granulovirus; a Plodia interpunctella granulovirus; a Plutella xylostella granulovirus; a Spodoptera frugiperda granulovirus; a Spodoptera litura granulovirus; a Trichoplusia ni granulovirus; a Trichoplusia ni granulovirus LBIV-12; a Xestia c-nigrum granulovirus; a unclassified Betabaculovirus; a Achaea janata granulovirus; a Adoxophyes honmai granulovirus; a Agrotis exclamationis granulovirus; a Amelia pallorana granulovirus; a Andraca bipunctata granulovirus; a Autographa gamma granulovirus; a Caloptilia theivora granulovirus; a Choristoneura murinana granulovirus; a Choristoneura viridis betabaculovirus; a Clostera anastomosis granulovirus; a Cnephasia longana granulovirus; a Estigmene acrea granulovirus; a Euxoa ochrogaster granulovirus; a Heliothis armigera granulovirus; a Hoplodrina ambigua granulovirus; a Hyphantria cunea granulovirus; a Natada nararia granulovirus; a Nephelodes emmedonia granulovirus; a Pandemis limitata granulovirus; a Peridorma morpontora granulovirus; a Pieris rapae granulovirus; a Plathypena scabra granulovirus; a Pseudaletia betabaculovirus; a Scotogramma trifolii granulovirus; a Spodoptera androgea granulovirus; a Spodoptera littoralis granulovirus; a Tecia solanivora granulovirus; or a Mocis sp. Granulovirus.

[1671] In some embodiments, the IA selected from the group consisting of: a Photorhabdus luminescens toxin; a Beauveria bassiana toxin; a Galanthus nivalis agglutinin (GNA); an Azadirachtin compound; a boric acid; and a Cydia pomonella granulovirus (CpGV).

[1672] In some embodiments, the Photorhabdus luminescens toxin comprises a Photorhabdus luminescens toxin complex (Tca).

[1673] In some embodiments, the Tca comprises a TcaA protein (SEQ ID NO: 616), a TcaB protein (SEQ ID NO: 617), a TcaC protein (SEQ ID NO: 618), and a TcaZ protein (SEQ ID NO: 619).

[1674] In some embodiments, the Beauveria bassiana toxin is a beauvericin toxin.

[1675] In some embodiments, the beauvericin toxin is a beauvericin toxin having the chemical formula C₄₅H₅₇N₃O₉; a beauvericin A toxin having the chemical formula C₄₆H₅₉N₃O₉; or a beauvericin B toxin having the chemical formula C₄₇H₆₁N₃O₉.

[1676] In some embodiments, the Beauveria bassiana toxin is a beauvericin toxin isolated from a Beauveria bassiana strain ANT-03 spore.

[1677] In some embodiments, the GNA has an amino acid sequence as set forth in SEQ ID NO: 35.

[1678] In some embodiments, the CpGV is a Cydia pomonella granulovirus isolate V22 virus.

[1679] In some embodiments, the IA is one or more fermentation solids, spores, or toxins isolated from a Bacillus thuringiensis var. israelensis (Bti).

[1680] In some embodiments, the IA is one or more fermentation solids, spores, or toxins isolated from a Bacillus thuringiensis ssp. israelensis strain BMP 144.

[1681] In some embodiments, the IA is one or more fermentation solids, spores, or toxins isolated from a Bacillus thuringiensis var. kurstaki (Btk).

[1682] In some embodiments, the IA is one or more fermentation solids, spores, or toxins isolated from a Bacillus thuringiensis ssp. kurstaki strain EVB-113-19.

[1683] In some embodiments, the IA is one or more fermentation solids, spores, or toxins isolated from a Bacillus thuringiensis var. tenebrionis (Btt).

[1684] In some embodiments, the Btt toxin is one or more fermentation solids, spores, or toxins isolated from a Bacillus thuringiensis ssp. tenebrionis strain NB-176.

[1685] In some embodiments, the CRIP is a U1-agatoxin-Ta1b peptide; a U1-agatoxin-Ta1b Variant Polypeptide (TVP); a sea anemone toxin; an Av3 Variant Polypeptide (AVP); a Phoneutria toxin; or an Atracotoxin (ACTX).

[1686] In some embodiments, the U1-agatoxin-Ta1b peptide has an amino acid sequence that is at least 90% identical to the amino acid sequence set forth in SEQ ID NO: 1.

[1687] In some embodiments, the U1-agatoxin-Ta1b peptide has an amino acid sequence according to the amino acid sequence set forth in SEQ ID NO: 1.

[1688] In some embodiments, the TVP has an amino acid sequence that is at least 90% identical to an amino acid sequence set forth in any one of SEQ ID NOs: 2-15, 49-53, 2-15, 49-53, 621-622, 624-628, 631-640, 642-651, or 653-654.

[1689] In some embodiments, the TVP has an amino acid sequence according to the amino acid sequence set forth in any one of SEQ ID NOs: 2-15, 49-53, 2-15, 49-53, 621-622, 624-628, 631-640, 642-651, or 653-654.

[1690] In some embodiments, the sea anemone toxin is an Av2 toxin, or an Av3 toxin.

[1691] In some embodiments, the Av2 toxin has an amino acid sequence that is at least 90% identical to an amino acid sequence set forth in SEQ ID NO: 588.

[1692] In some embodiments, the Av2 toxin has an amino acid sequence according to the amino acid sequence set forth in SEQ ID NO: 588.

[1693] In some embodiments, the Av3 toxin has an amino acid sequence that is at least 90% identical to an amino acid sequence set forth in SEQ ID NO: 44.

[1694] In some embodiments, the Av3 toxin has an amino acid sequence according to the amino acid sequence set forth in SEQ ID NO: 44.

[1695] In some embodiments, the AVP is an AVPa peptide, an AVPa-C1 peptide, or an AVPb peptide.

[1696] In some embodiments, the AVPa toxin has an amino acid sequence that is at least 90% identical to an amino acid sequence set forth in SEQ ID NO: 45.

[1697] In some embodiments, AVPa toxin has an amino acid sequence according to the amino acid sequence set forth in SEQ ID NO: 45.

[1698] In some embodiments, the AVPa-C1 toxin has an amino acid sequence that is at least 90% identical to an amino acid sequence set forth in SEQ ID NO: 46.

[1699] In some embodiments, the AVPa-C1 toxin has an amino acid sequence according to the amino acid sequence set forth in SEQ ID NO: 46.

[1700] In some embodiments, the AVPb toxin has an amino acid sequence that is at least 90% identical to an amino acid sequence set forth in SEQ ID NO: 47.

[1701] In some embodiments, the AVPb toxin has an amino acid sequence according to the amino acid sequence set forth in SEQ ID NO: 47.

[1702] In some embodiments, the CRIP is a ctenitoxin (CNTX).

[1703] In some embodiments, the CNTX is Γ-CNTX-Pn1a.

[1704] In some embodiments, the Γ-CNTX-Pn1a has an amino acid sequence that is at least 90% identical to an amino acid sequence set forth in SEQ ID NO: 65.

[1705] In some embodiments, the Γ-CNTX-Pn1a has an amino acid sequence according the amino acid sequence set forth in SEQ ID NO: 65.

[1706] In some embodiments, the CRIP is an ACTX.

[1707] In some embodiments, the ACTX is a U-ACTX peptide, Omega-ACTX peptides, or Kappa-ACTX peptide.

[1708] In some embodiments, the ACTX is a U-ACTX-Hv1a, a U+2-ACTX-Hv1a, a rU-ACTX-Hv1a, a rU-ACTX-Hv1b, a K-ACTX-Hv1a, a κ+2-ACTX-Hv1a, a ω-ACTX-Hv1a, or a ω+2-ACTX-Hv1a.

[1709] In some embodiments, the ACTX has an amino acid sequence that is at least 90% identical to an amino acid sequence set forth in any one of SEQ ID NOs: 60-64 and 594

[1710] In some embodiments, the ACTX has an amino acid sequence according an amino acid sequence set forth in any one of SEQ ID NOs: 60-64 and 594.

[1711] In some embodiments, the ACTX has an amino acid sequence that is at least 90% identical to an amino acid sequence set forth in SEQ ID NO: 61.

[1712] In some embodiments, the ACTX has an amino acid sequence according the amino acid sequence set forth in SEQ ID NO: 61.

[1713] In some embodiments, the CRIP is selected from the group consisting of: a U1-agatoxin-Ta1b peptide having an amino acid sequence according to the amino acid sequence set forth in SEQ ID NO: 1; a TVP having an amino acid sequence according to the amino acid sequence set forth in any one of SEQ ID NOs: 2-15, 49-53, 2-15, 49-53, 621-622, 624-628, 631-640, 642-651, or 653-654; an Av3-Variant Polypeptide (AVP) having an amino acid sequence set forth in SEQ ID NO: 47; a Γ-CNTX-Pn1a having an amino acid sequence set forth in SEQ ID NO: 65; or a U+2-ACTX-Hula having an amino acid sequence set forth in SEQ ID NO: 61.

[1714] In some embodiments, the ratio of IA to CRIP is about 10,000:1, 5,000:1, 1,000:1, 500:1, 250:1, 200:1, 100:1, 99:1, 95:5, 90:10, 85:15, 80:20, 75:25, 70:30, 65:35, 60:40, 55:45, 1:1, 45:55, 40:60, 35:65, 30:70, 25:75, 20:80, 15:85, 10:90, 5:95, 1:99, 1:100, 1:200, 1:250, 1:500, 1:1,000, 1:5,000, or 1:10,000.

[1715] In some embodiments, the IA is one or more fermentation solids, spores, or toxins isolated from a Bacillus thuringiensis var. israelensis (Bti); and the CRIP is an ACTX; and wherein the ratio of the one or more fermentation solids, spores, and toxins isolated from a Bacillus thuringiensis var. israelensis (Bti) to the ACTX is from about 1:1 to about 1:5000.

[1716] In some embodiments, the ratio of the one or more fermentation solids, spores, or toxins isolated from a Bacillus thuringiensis var. israelensis (Bti) to the ACTX is about 1:4000.

[1717] In some embodiments, the IA is one or more fermentation solids, spores, or toxins isolated from a Bacillus thuringiensis var. kurstaki (Btk); and the CRIP is an ACTX; and wherein the ratio of the one or more fermentation solids, spores, or toxins isolated from a Bacillus thuringiensis var. kurstaki (Btk) to the ACTX is from about 1:1 to about 1:10.

[1718] In some embodiments, the ratio of the one or more fermentation solids, spores, or toxins isolated from a Bacillus thuringiensis var. kurstaki (Btk) to ACTX is about 1:9.2

[1719] In some embodiments, the IA is one or more fermentation solids, spores, or toxins isolated from a Bacillus thuringiensis var. kurstaki (Btk); and the CRIP is an AVP; and wherein the ratio of the one or more fermentation solids, spores, or toxins isolated from a Bacillus thuringiensis var. kurstaki (Btk) to AVP is from about 1:1 to about 1:1.5.

[1720] In some embodiments, the ratio of the one or more fermentation solids, spores, or toxins isolated from a Bacillus thuringiensis var. kurstaki (Btk) to AVP is about 1:1.375.

[1721] In some embodiments, the IA is one or more fermentation solids, spores, or toxins isolated from a Bacillus thuringiensis var. tenebrionis (Btt); and the CRIP is an ACTX; and wherein the ratio of the one or more fermentation solids, spores, or toxins isolated from the Bacillus thuringiensis var. tenebrionis (Btt) to the ACTX is from about 1:1 to about 1:10.

[1722] In some embodiments, the ratio of the one or more fermentation solids, spores, or toxins isolated from the Bacillus thuringiensis var. tenebrionis (Btt) to the ACTX is about 1:8.75.

[1723] In some embodiments, the present invention provides a composition comprising the combination comprising: (1) one or more CRIPs, or pharmaceutically acceptable salts thereof; one or more CRIP-insecticidal proteins, or pharmaceutically acceptable salts thereof; or a combination thereof; and (2) one or more Insecticidal Agents (IA), as described herein; and further comprising an excipient.

[1724] In some embodiments, the present invention provides a combination comprising one or more fermentation solids, spores, or toxins isolated from a Bacillus thuringiensis ssp. kurstaki strain EVB-113-19, and a U1-agatoxin-Ta1b peptide having an amino acid sequence according to the amino acid sequence set forth in SEQ ID NO: 1.

[1725] In some embodiments, the present invention provides a combination comprising one or more fermentation solids, spores, or toxins isolated from a Bacillus thuringiensis ssp. kurstaki strain EVB-113-19, and a U1-agatoxin-Ta1b Variant Polypeptide (TVP) having an amino acid sequence according to the amino acid sequence set forth in SEQ ID NO: 2.

[1726] In some embodiments, the present invention provides a combination comprising one or more fermentation solids, spores, or toxins isolated from a Bacillus thuringiensis ssp. kurstaki strain EVB-113-19, and an Av3-Variant Polypeptide (AVP) having an amino acid sequence according to the amino acid sequence set forth in SEQ ID NO: 67.

[1727] In some embodiments, the present invention provides a combination comprising one or more fermentation solids, spores, or toxins isolated from a Bacillus thuringiensis ssp. kurstaki strain EVB-113-19, and a Γ-CNTX-Pn1a toxin having an amino acid sequence according to the amino acid sequence set forth in SEQ ID NO: 65.

[1728] In some embodiments, the present invention provides a combination comprising a Beauveria bassiana strain ANT-03 spore, and a U+2-ACTX-Hv1a toxin having an amino acid sequence according to the amino acid sequence set forth in SEQ ID NO: 61.

[1729] In some embodiments, the present invention provides a combination comprising one or more fermentation solids, spores, or toxins isolated from a Bacillus thuringiensis ssp. tenebrionis strain NB-176, and a U+2-ACTX-Hv1a toxin having an amino acid sequence according to the amino acid sequence set forth in SEQ ID NO: 61.

[1730] In some embodiments, the present invention provides a combination comprising one or more fermentation solids, spores, or toxins isolated from a Bacillus thuringiensis ssp. kurstaki strain EVB-113-19, and a U+2-ACTX-Hv1a toxin having an amino acid sequence according to the amino acid sequence set forth in SEQ ID NO: 61.

[1731] In some embodiments, the present invention provides a combination comprising one or more fermentation solids, spores, or toxins isolated from a Bacillus thuringiensis ssp. israelensis Strain BMP 144, and a U+2-ACTX-Hv1a toxin having an amino acid sequence according to the amino acid sequence set forth in SEQ ID NO: 61.

[1732] In some embodiments, the present invention provides a combination comprising a Photorhabdus luminescens toxin, and an ACTX; wherein the Photorhabdus luminescens toxin is a Photorhabdus luminescens toxin complex (Tca) comprising a TcaA (SEQ ID NO: 616), a TcaB (SEQ ID NO: 617), a TcaC (SEQ ID NO: 618), and a TcaZ (SEQ ID NO: 619); and wherein the ACTX peptide is a U+2-ACTX-Hv1a toxin (SEQ ID NO: 61).

[1733] In some embodiments, the present invention provides a combination comprising a Galanthus nivalis agglutinin (GNA), and an ACTX; wherein the GNA has an amino acid sequence as set forth in SEQ ID NO: 35; and wherein the ACTX peptide is a U+2-ACTX-Hv1a toxin having an amino acid sequence according to the amino acid sequence set forth in SEQ ID NO: 61.

[1734] In some embodiments, the present invention provides a combination comprising an Azadirachtin, and an ACTX; wherein the Azadirachtin is an Azadirachtin having a chemical formula: C₃₅H₄₄O₁₆; and wherein the ACTX is a U+2-ACTX-Hv1a toxin having an amino acid sequence according to the amino acid sequence set forth in SEQ ID NO: 61.

[1735] In some embodiments, the present invention provides a combination comprising a boric acid compound, and an ACTX; wherein the boric acid compound has a chemical formula of H₃BO₃; and wherein the ACTX peptide is a U+2-ACTX-Hv1a toxin having an amino acid sequence according to the amino acid sequence set forth in SEQ ID NO: 61.

[1736] In some embodiments, the present invention provides a combination comprising a Cydia pomonella granulovirus (CpGV), and an ACTX; wherein the CpGV is a Cydia pomonella granulovirus isolate V22 virus; and wherein the ACTX peptide is a U+2-ACTX-Hv1a toxin having an amino acid sequence according to the amino acid sequence set forth in SEQ ID NO: 61.

[1737] In some embodiments, the present invention provides a method of using the combination comprising (1) one or more CRIPs, or pharmaceutically acceptable salts thereof; one or more CRIP-insecticidal proteins, or pharmaceutically acceptable salts thereof; or a combination thereof; (2) one or more Insecticidal Agents (IA), as described herein; and (3) one or more excipients; to control insects, said method comprising, providing a combination of at least one CRIP and at least one IA, applying the combination to the locus of an insect.

[1738] In some embodiments, the insects are selected from the group consisting of: Achema Sphinx Moth (Hornworm) (Eumorpha achemon); Alfalfa Caterpillar (Colias eurytheme); Almond Moth (Caudra cautella); Amorbia Moth (Amorbia humerosana); Armyworm (Spodoptera spp., e.g. exigua, frugiperda, littoralis, Pseudaletia unipuncta); Artichoke Plume Moth (Platyptilia carduidactyla); Azalea Caterpillar (Datana major); Bagworm (Thyridopteryx); ephemeraeformis); Banana Moth (Hypercompe scribonia); Banana Skipper (Erionota thrax); Blackheaded Budworm (Acleris gloverana); California Oakworm (Phryganidia californica); Spring Cankerworm (Paleacrita merriccata); Cherry Fruitworm (Grapholita packardi); China Mark Moth (Nymphula stagnata); Citrus Cutworm (Xylomyges curialis); Codling Moth (Cydia pomonella); Cranberry Fruitworm (Acrobasis vaccinii); Cross-striped Cabbageworm (Evergestis rimosalis); Cutworm (Noctuid species, Agrotis ipsilon); Douglas Fir Tussock Moth (Orgyia pseudotsugata); Ello Moth (Hornworm) (Erinnyis ello); Elm Spanworm (Ennomos subsignaria); European Grapevine Moth (Lobesia botrana); European Skipper (Thymelicus lineola (Essex Skipper); Fall Webworm (Melissopus latiferreanus; Filbert Leafroller (Archips rosanus; Fruittree Leafroller (Archips argyrospilia; Grape Berry Moth (Paralobesia viteana; Grape Leafroller (Platynota stultana; Grapeleaf Skeletonizer (Harrisina americana (ground only); Green Cloverworm (Plathypena scabra; Greenstriped Mapleworm (Dryocampa rubicunda; Gummosos-Batrachedra; Comosae (Hodges); Gypsy Moth (Lymantria dispar); Hemlock Looper (Lambdina fiscellaria); Hornworm (Manduca spp.); Imported Cabbageworm (Pieris rapae); Io Moth (Automeris io); Jack Pine Budworm (Choristoneura pinus); Light Brown Apple Moth (Epiphyas postvittana); Melonworm (Diaphania hyalinata); Mimosa Webworm (Homadaula anisocentra); Obliquebanded Leafroller (Choristoneura rosaceana); Oleander Moth (Syntomeida epilais); Omnivorous Leafroller (Playnota stultana); Omnivorous Looper (Sabulodes aegrotata); Orangedog (Papilio cresphontes); Orange Tortrix (Argyrotaenia citrana); Oriental Fruit Moth (Grapholita molesta); Peach Twig Borer (Anarsia lineatella); Pine Butterfly (Neophasia menapia); Podworm (Heliocoverpa zea); Redbanded Leafroller (Argyrotaenia velutinana); Redhumped Caterpillar (Schizura concinna); Rindworm Complex (Various Leps.); Saddleback Caterpillar (Sibine stimulea); Saddle Prominent Caterpillar Heterocampa guttivitta); Saltmarsh Caterpillar (Estigmene acrea); Sod Webworm (Crambus spp.); Spanworm (Ennomos subsignaria); Fall Cankerworm (Alsophila pometaria); Spruce Budworm (Choristoneura fumiferana); Tent Caterpillar (Various Lasiocampidae); Thecla-Thecla Basilides (Geyr) Thecla basilides); Tobacco Hornworm (Manduca sexta); Tobacco Moth (Ephestia elutella); Tufted Apple Budmoth (Platynota idaeusalis); Twig Borer (Anarsia lineatella); Variegated Cutworm (Peridroma saucia); Variegated Leafroller (Platynota flavedana); Velvetbean Caterpillar (Anticarsia gemmatalis); Walnut Caterpillar (Datana integerrima); Webworm (Hyphantria cunea); Western Tussock Moth (Orgyia vetusta); Southern Cornstalk Borer (Diatraea crambidoides); Corn Earworm; Sweet potato weevil; Pepper weevil; Citrus root weevil; Strawberry root weevil; Pecan weevil; Filbert weevil; Ricewater weevil; Alfalfa weevil; Clover weevil; Tea shot-hole borer; Root weevil; Sugarcane beetle; Coffee berry borer; Annual blue grass weevil (Listronotus maculicollis); Asiatic garden beetle (Maladera castanea); European chafer (Rhizotroqus majalis); Green June beetle (Cotinis nitida); Japanese beetle (Popillia japonica); May or June beetle (Phyllophaga sp.); Northern masked chafer (Cyclocephala borealis); Oriental beetle (Anomala orientalis); Southern masked chafer (Cyclocephala lurida); Billbug (Curculionoidea); Aedes aegypti; Busseola fusca; Chilo suppressalis; Culex pipiens; Culex quinquefasciatus; Diabrotica virgifera; Diatraea saccharalis; Helicoverpa armigera; Helicoverpa zea; Heliothis virescens; Leptinotarsa decemlineata; Ostrinia furnacalis; Ostrinia nubilalis; Pectinophora gossypiella; Plodia interpunctella; Plutella xylostella; Pseudoplusia includens; Spodoptera exigua; Spodoptera frugiperda; Spodoptera littoralis; Trichoplusia ni; and Xanthogaleruca luteola.

[1739] In some embodiments, the present invention provides a method of using the combination comprising (1) one or more CRIPs, or pharmaceutically acceptable salts thereof; one or more CRIP-insecticidal proteins, or pharmaceutically acceptable salts thereof; or a combination thereof; (2) one or more Insecticidal Agents (IA), as described herein; and optionally (3) one or more excipients; to control Bacillus thuringiensis-toxin-resistant insects comprising, providing a combination of at least one CRIP and at least on IA; and then applying said combination to the locus of an insect.

[1740] In some embodiments, the Bacillus thuringiensis-toxin-resistant insects are selected from the group consisting of: Aedes aegypti; Busseola fusca; Chilo suppressalis; Culex pipiens; Culex quinquefasciatus; Diabrotica virgifera; Diatraea saccharalis; Helicoverpa armigera; Helicoverpa zea; Heliothis virescens; Leptinotarsa decemlineata; Ostrinia furnacalis; Ostrinia nubilalis; Pectinophora gossypiella; Plodia interpunctella; Plutella xylostella; Pseudoplusia includens; Spodoptera exigua; Spodoptera frugiperda; Spodoptera littoralis; Trichoplusia ni; and Xanthogaleruca luteola.

[1741] In some embodiments, the present invention provides a method of combating, controlling, or inhibiting a pest comprising, applying a pesticidally effective amount of the combination comprising (1) one or more CRIPs, or pharmaceutically acceptable salts thereof; one or more CRIP-insecticidal proteins, or pharmaceutically acceptable salts thereof; or a combination thereof; (2) one or more Insecticidal Agents (IA), as described herein; and optionally (3) one or more excipients; to the locus of the pest, or to a plant or animal susceptible to an attack by the pest.

[1742] In some embodiments, the pest is selected from the group consisting of: Achema Sphinx Moth (Hornworm) (Eumorpha achemon); Alfalfa Caterpillar (Colias eurytheme); Almond Moth (Caudra cautella); Amorbia Moth (Amorbia humerosana); Armyworm (Spodoptera spp., e.g. exigua, frugiperda, littoralis, Pseudaletia unipuncta); Artichoke Plume Moth (Platyptilia carduidactyla); Azalea Caterpillar (Datana major); Bagworm (Thyridopteryx); ephemeraeformis); Banana Moth (Hypercompe scribonia); Banana Skipper (Erionota thrax); Blackheaded Budworm (Acleris gloverana); California Oakworm (Phryganidia californica); Spring Cankerworm (Paleacrita merriccata); Cherry Fruitworm (Grapholita packardi); China Mark Moth (Nymphula stagnata); Citrus Cutworm (Xylomyges curialis); Codling Moth (Cydia pomonella); Cranberry Fruitworm (Acrobasis vaccinii); Cross-striped Cabbageworm (Evergestis rimosalis); Cutworm (Noctuid species, Agrotis ipsilon); Douglas Fir Tussock Moth (Orgyia pseudotsugata); Ello Moth (Hornworm) (Erinnyis ello); Elm Spanworm (Ennomos subsignaria); European Grapevine Moth (Lobesia botrana); European Skipper (Thymelicus lineola (Essex Skipper); Fall Webworm (Melissopus latiferreanus; Filbert Leafroller (Archips rosanus; Fruittree Leafroller (Archips argyrospilia; Grape Berry Moth (Paralobesia viteana; Grape Leafroller (Platynota stultana; Grapeleaf Skeletonizer (Harrisina americana (ground only); Green Cloverworm (Plathypena scabra; Greenstriped Mapleworm (Dryocampa rubicunda; Gummosos-Batrachedra; Comosae (Hodges); Gypsy Moth (Lymantria dispar); Hemlock Looper (Lambdina fiscellaria); Hornworm (Manduca spp.); Imported Cabbageworm (Pieris rapae); Io Moth (Automeris io); Jack Pine Budworm (Choristoneura pinus); Light Brown Apple Moth (Epiphyas postvittana); Melonworm (Diaphania hyalinata); Mimosa Webworm (Homadaula anisocentra); Obliquebanded Leafroller (Choristoneura rosaceana); Oleander Moth (Syntomeida epilais); Omnivorous Leafroller (Playnota stultana); Omnivorous Looper (Sabulodes aegrotata); Orangedog (Papilio cresphontes); Orange Tortrix (Argyrotaenia citrana); Oriental Fruit Moth (Grapholita molesta); Peach Twig Borer (Anarsia lineatella); Pine Butterfly (Neophasia menapia); Podworm (Heliocoverpa zea); Redbanded Leafroller (Argyrotaenia velutinana); Redhumped Caterpillar (Schizura concinna); Rindworm Complex (Various Leps.); Saddleback Caterpillar (Sibine stimulea); Saddle Prominent Caterpillar Heterocampa guttivitta); Saltmarsh Caterpillar (Estigmene acrea); Sod Webworm (Crambus spp.); Spanworm (Ennomos subsignaria); Fall Cankerworm (Alsophila pometaria); Spruce Budworm (Choristoneura fumiferana); Tent Caterpillar (Various Lasiocampidae); Thecla-Thecla Basilides (Geyr) Thecla basilides); Tobacco Hornworm (Manduca sexta); Tobacco Moth (Ephestia elutella); Tufted Apple Budmoth (Platynota idaeusalis); Twig Borer (Anarsia lineatella); Variegated Cutworm (Peridroma saucia); Variegated Leafroller (Platynota flavedana); Velvetbean Caterpillar (Anticarsia gemmatalis); Walnut Caterpillar (Datana integerrima); Webworm (Hyphantria cunea); Western Tussock Moth (Orgyia vetusta); Southern Cornstalk Borer (Diatraea crambidoides); Corn Earworm; Sweet potato weevil; Pepper weevil; Citrus root weevil; Strawberry root weevil; Pecan weevil; Filbert weevil; Ricewater weevil; Alfalfa weevil; Clover weevil; Tea shot-hole borer; Root weevil; Sugarcane beetle; Coffee berry borer; Annual blue grass weevil (Listronotus maculicollis); Asiatic garden beetle (Maladera castanea); European chafer (Rhizotroqus majalis); Green June beetle (Cotinis nitida); Japanese beetle (Popillia japonica); May or June beetle (Phyllophaga sp.); Northern masked chafer (Cyclocephala borealis); Oriental beetle (Anomala orientalis); Southern masked chafer (Cyclocephala lurida); Billbug (Curculionoidea); Aedes aegypti; Busseola fusca; Chilo suppressalis; Culex pipiens; Culex quinquefasciatus; Diabrotica virgifera; Diatraea saccharalis; Helicoverpa armigera; Helicoverpa zea; Heliothis virescens; Leptinotarsa decemlineata; Ostrinia furnacalis; Ostrinia nubilalis; Pectinophora gossypiella; Plodia interpunctella; Plutella xylostella; Pseudoplusia includens; Spodoptera exigua; Spodoptera frugiperda; Spodoptera littoralis; Trichoplusia ni; and Xanthogaleruca luteola.

[1743] In some embodiments, the pest is selected from the group consisting of: Aedes aegypti; Busseola fusca; Chilo suppressalis; Culex pipiens; Culex quinquefasciatus; Diabrotica virgifera; Diatraea saccharalis; Helicoverpa armigera; Helicoverpa zea;

[1744] Heliothis virescens; Leptinotarsa decemlineata; Ostrinia furnacalis; Ostrinia nubilalis; Pectinophora gossypiella; Plodia interpunctella; Plutella xylostella; Pseudoplusia includens; Spodoptera exigua; Spodoptera frugiperda; Spodoptera littoralis; Trichoplusia ni; and Xanthogaleruca luteola.

### EXAMPLES

[1745] The Examples in this specification are not intended to, and should not be used to, limit the invention; they are provided only to illustrate the invention.

### Example 1: Bti Toxins and U+2-ACTX-Hv1a

[1746] Combinations of Bacillus thuringiensis var. israelensis (Bti) toxins and U+2-ACTX-Hv1a were evaluated for their insecticidal activity in a liquid solution assay against third instar Aedes aegypti (mosquito) larvae. Briefly, treatments of either: (1) combinations of U+2-ACTX-Hv1a with Bti toxin; (2) Bti toxin alone; (3) U+2-ACTX-Hv1a alone; or (4) water (as an untreated control), were applied to the mosquito larvae, and mortality was then assessed.

[1747] Treatments

[1748] Treatments were compositions consisting of the following components:
[1749] (1) Bti toxins (0.2511 g/mL or 0.25 ppm). To evaluate the effect of Bti toxins, AQUABAC XT® from Becker Microbial Products, Inc. was used. AQUABAC XT® consists of the following ingredients: 6-10% (˜8%) Bacillus thuringiensis ssp. israelensis Strain BMP 144 solids, spores & insecticidal toxins, wherein said insecticidal toxins are δ-endotoxins, and equivalent to 1,200 International Toxic Units (ITU/mg) (4.84 Billion ITU/gallon or 1.2 Billion ITU/Liter); and ˜92% other/inactive ingredients. AQUABAC XT® is commercially available from Becker Microbial Products, Inc., 11146 N.W. 69th Place, Parkland, FL 33076, U.S.A.; website: https://beckermicrobialproductsinc.com/; product code: 27376; EPA Reg. No. 62637-1.
[1750] (2) U+2-ACTX-Hv1a (1 mg/mL). U+2-ACTX-Hv1a (also referred to as “Spear”) having an amino acid sequence of “GSQYCVPVDQPCSLNTQPCCDDATCTQERNENGHTVYYCRA” (SEQ ID NO: 61) was obtained according to the methods described herein.
[1751] (3) Bti toxins+U+2-ACTX-Hv1a. Bti toxins and U+2-ACTX-Hv1a were prepared as described above, and combined. The final combination composition consisted of the following components: 0.1% w/v of U+2-ACTX-Hv1a; and 0.000025% v/v Bti toxins, of the total volume of the composition, with the remainder water
[1752] (4) Control (water).

[1753] Generating U+2-ACTX-Hv1a

[1754] Briefly, to obtain U+2-ACTX-Hv1a, a recombinant K. lactis expression system was used: the expression vector, pKLAC1, and the K. lactis strain, YCT306, both available from New England Biolabs® (Ipswich, MA, USA). A codon-optimized transgene operable to encode U+2-ACTX-Hv1a, and under control of a LAC4 promoter, was cloned into pKLAC1, and, and transformed into YCT306. The resulting transformants produced pre-propeptides comprising an α-mating factor signal peptide, a Kex2 cleavage site, and mature U+2-ACTX-Hv1a. The α-Mating factor signal peptide guides the pre-propeptides to go through the endogenous secretion pathway, and subsequently the mature U+2-ACTX-Hv1a are released into the growth media. Reverse-phase HPLC was used to purify U+2-ACTX-Hv1a from the growth media via monolithic C18 columns using water with 0.1% Trifloroacetic acid, and acetonitrile as the mobile phase. An elution protocol using 20-40% acetonitrile was used for U+2-ACTX-Hv1a purification, in which U+2-ACTX-Hv1a was eluted between a range of 34-36% acetonitrile. The resulting U+2-ACTX-Hv1a peptides were then formulated into wettable granules (WG) by blending and agglomerating the U+2-ACTX-Hv1a peptides together with surfactants and using water as an agglomerating agent. Methods for producing WGs are well known in the art.

[1755] Liquid Solution Assay

[1756] Each treatment was tested nine times (N=9). Here, the amount of Bti toxin used 0.25 μg/mL or 0.25 ppm. The amount of U+2-ACTX-Hv1a used in this example was 1 mg/mL.

[1757] To test the foregoing treatments, an arena was established that consisted of a 59 mL cup containing 30 mL of water. In each cup, third instar mosquito larvae (N=10) were added. No food was provided. Next, a given treatment solution was added to cup, and the cup was sealed with a lid. The cups were then placed on a tray under fluorescent grow lights. Three replicates were provided for each treatment.

[1758] After 24 hours, the combination of U+2-ACTX-Hv1a with Bti toxin resulted in a surprising, synergistic effect corresponding to 95% mortality. Alternatively, Bti toxin alone only resulted in 57% mortality, and U+2-ACTX-Hv1a alone only resulted in 4% mortality. Accordingly, the combination of U+2-ACTX-Hv1a with Bti toxin resulted in a surprising synergistic effect that was greater than the expected additive effect of combining U+2-ACTX-Hv1a with Bti toxins. FIG. 1.

### Example 2: Btk Toxin and Γ-CNTX-Pn1a

[1759] Combinations of Bacillus thuringiensis var. kurstaki (Btk) toxins and F-CNTX-Pn1a were evaluated for their insecticidal activity in a foliar spray bioassay against Spodoptera exigua (beet armyworm). Briefly, treatments of either: (1) Γ-CNTX-Pn1a alone; (2) Btk toxin alone; (3) a combination of Γ-CNTX-Pn1a and Btk toxin; or (4) a control (0.125% Vintre, a surfactant), were sprayed on leaves, and mortality was then assessed.

[1760] Treatments

[1761] Treatments were compositions consisting of the following components:
[1762] (1) Btk toxins (0.0107% v/v). To evaluate Btk toxin, BioProtec Plus™ from AEF Global Inc. was used. BioProtec Plus™ consists of 14.49% Bacillus thuringiensis ssp. kurstaki strain EVB-113-19 fermentation solids, spores, and insecticidal toxins with a potency of 17,500 Cabbage Looper Units (CLU) per mg of product (equivalent to 76 billion CLU per gallon of product); and 85.51% other/inactive ingredients. BioProtec Plus™ consisting of 14.49% Bacillus thuringiensis ssp. kurstaki strain EVB-113-19 fermentation solids, spores, and insecticidal toxins, is commercially available from AEF Global Inc., 925 des calfats, US-QC, Levis, G6Y9E8, Canada; website: http://www.aefglobal.com/en/; CAS number: 68038-71-1; lot number: 31G18.
[1763] (2) Γ-CNTX-Pn1a (0.034% w/v, 0.152% w/v and 0.675% w/v). Γ-CNTX-Pn1a having an amino acid sequence of “GSCADINGACKSDCDCCGDSVTCDCYWSDSCKCRESNFKIGMAIRKKFC” (SEQ ID NO: 65) was obtained using ion exchange chromatography, and according to the methods described below.
[1764] (3) Btk toxins+Γ-CNTX-Pn1a. Btk toxins and Γ-CNTX-Pn1a were prepared as described above, and combined. The final combination compositions tested were as follows:
[1765] Low dose Γ-CNTX-Pn1a: 0.034% w/v Γ-CNTX-Pn1a; 0.125% v/v Vintre; 0.0107% v/v Btk toxins, of the total volume of the composition, with the remainder water.
[1766] Intermediate dose Γ-CNTX-Pn1a: 0.152% w/v Γ-CNTX-Pn1a; 0.125% v/v Vintre; 0.0107% v/v Btk toxins, of the total volume of the composition, with the remainder water.
[1767] High dose Γ-CNTX-Pn1a: 0.675% w/v Γ-CNTX-Pn1a; 0.125% v/v Vintre; 0.0107% v/v Btk toxins, of the total volume of the composition, with the remainder water.
[1768] (4) Control (0.125% Vintre®). Vintre® (used here and in the above treatments) is a surfactant that consists of 8.92% alcohol ethoxylate, and 91.08% constituents ineffective as spray adjuvants (ORO AGRI, Inc, 990 Trophy Club Dr., Trophy Club, TX 76262 USA). Vintre is commercially available from several vendors, and is a product that is well known to those having ordinary skill in the art.

[1769] Generating Γ-CNTX-Pn1a

[1770] A DNA construct of Γ-CNTX-Pn1a having an amino acid sequence of “GSCADINGACKSDCDCCGDSVTCDCYWSDSCKCRESNFKIGMAIRKKFC” (SEQ ID NO: 65) was codon optimized and synthesized as a fusion with Kluyveromyces lactis alpha mating factor pre/pro sequence (αMF) and ligated into the NotI and HindIII restriction sites of pKlac1 (New England Biolabs). The vector was digested with SacII to linearize and remove the bacterial Ori and selection marker, then electroporated into electrocompetent Kluyveromyces lactis cells. Multiple gene copy transformants were selected on selection plates containing acetamide as the sole nitrogen source. Clones expressing Γ-CNTX-Pn1a were assessed by HPLC on a Chromolith C18 column (4.6×100 mm) and eluted at a flow rate of 2 mL min-1 and gradient of 15-33% acetonitrile over 8 min.

[1771] Γ-CNTX-Pn1a was purified by cation exchange chromatography using Sephadex C-25 resin. Supernatant was bound to resin and eluted with increasing concentrations of sodium chloride. Elutions were dialyzed, lyophilized, and resuspended in water.

[1772] Foliar Spray Bioassay

[1773] The effect of combining Bacillus thuringiensis var. kurstaki (Btk) toxin with Γ-CNTX-Pn1a was tested against the Lepidopteran species, the beet armyworm (Spodoptera exigua). Mortality of the beet armyworm was assessed when confronting the insect with either (1) Γ-CNTX-Pn1a alone; (2) Btk toxin alone; (3) a combination of Γ-CNTX-Pn1a and Btk toxin; or (4) a control (0.125% Vintre, a surfactant).

[1774] To test the effect of the combinations, romaine lettuce was cut into 30 mm diameter disks, and then sterilized using a 140 ppm bleach solution; the disks were then triple rinsed. The romaine lettuce disks were then pinned to a Styrofoam board and sprayed with a given treatment; the disks were flipped, sprayed again, allowed to dry, and placed in the arena.

[1775] The arena was 32-well rearing tray containing 5 mL of 1% agar. One romaine lettuce disk was placed in each well, with a single second instar beet armyworm per leaf disk. The trays were then placed in a 28° C. Incubator. Each treatment was tested on 12 disks, with three replicates (N=36).

[1776] First, a sublethal dose (i.e., a dose resulting in approximately 20% of the population being killed, or ˜LD₂₀) of Btk toxin was determined, to allow the observation of Γ-CNTX-Pn1a when combined with Btk toxin.

[1777] Here, the sublethal does of Btk toxin was 736 ppm (0.736 mg/mL), which resulted in the death of 25% of the population. FIG. 2. Once the sublethal dose of Btk toxin was identified, the dose of Γ-CNTX-Pn1a was increased until the LD₅₀ amount was reached for the Γ-CNTX-Pn1a+Btk toxin combination. Accordingly, the final combination compositions were as follows: (1) Low dose Γ-CNTX-Pn1a: 0.034% w/v Γ-CNTX-Pn1a; 0.125% v/v Vintre; 0.0107% v/v Btk toxins, of the total volume of the composition, with the remainder water; (2) Intermediate dose Γ-CNTX-Pn1a: 0.152% w/v Γ-CNTX-Pn1a; 0.125% v/v Vintre; 0.0107% v/v Btk toxins, of the total volume of the composition, with the remainder water; and (3) High dose Γ-CNTX-Pn1a: 0.675% w/v Γ-CNTX-Pn1a; 0.125% v/v Vintre; 0.0107% v/v Btk toxins, of the total volume of the composition, with the remainder water.

[1778] As shown in FIG. 2, the use of 1.6 mg/mL of Γ-CNTX-Pn1a resulted in 6% mortality; however, when combined with 0.736 mg/mL of Btk toxin, the mortality jumped to 28%. Likewise, 6.75 mg/mL of Γ-CNTX-Pn1a caused a mortality rate of 3%; but, when combined with 0.736 mg/mL of Btk toxin, the mortality rate was 50%. This example demonstrates that a combination of Btk toxin and Γ-CNTX-Pn1a results in an unexpected effect.

### Example 3: Btk Toxin and AVPs

[1779] Combinations of Bacillus thuringiensis ssp. kurstaki (Btk) toxins and Av3-variant polypeptide (AVPs) were evaluated for their insecticidal activity in a foliar spray bioassay against Spodoptera exigua (beet armyworm). Briefly, treatments of either: (1) AVP alone; (2) Btk toxin alone; (3) a combination of both AVP and Btk toxin; or (4) a control (0.125% Vintre, a surfactant), were sprayed on leaves, and mortality was then assessed.

[1780] Treatments

[1781] Treatments were compositions consisting of the following components:
[1782] (1) Btk toxins (800 ppm or 0.8 mg/mL). To evaluate Btk toxin, BioProtec Plus™ from AEF Global Inc. was used. BioProtec Plus™ consists of 14.49% Bacillus thuringiensis ssp. kurstaki strain EVB-113-19 fermentation solids, spores, and insecticidal toxins with a potency of 17,500 Cabbage Looper Units (CLU) per mg of product (equivalent to 76 billion CLU per gallon of product); and 85.51% other/inactive ingredients. BioProtec Plus™ consisting of 14.49% Bacillus thuringiensis ssp. kurstaki strain EVB-113-19 fermentation solids, spores, and insecticidal toxins, is commercially available from AEF Global Inc., 925 des calfats, US-QC, Levis, G6Y9E8, Canada; website: http://www.aefglobal.com/en/; CAS number: 68038-71-1; lot number: 31G18.
[1783] (2) AVP (1, 3, and 9 mg/mL). The Av3-variant polypeptide (AVP) evaluated has an amino acid sequence of “KSCCPCYWGGCPWGQNCYPEGCSGPK” (SEQ ID NO: 47) (AVPb). Methods of generating the AVP are provided in detail below.
[1784] (3) Btk toxins+AVP. Btk toxins and AVP were prepared in amounts as described above, and combined. The final combination compositions tested were as follows:
[1785] Low dose AVP: 0.1% w/v AVP; 0.125% v/v Vintre; 0.0116% v/v Btk toxins, of the total volume of the composition, with the remainder water.
[1786] Intermediate dose AVP: 0.3% w/v AVP; 0.125% v/v Vintre; 0.0116% v/v Btk toxins, of the total volume of the composition, with the remainder water.
[1787] High dose AVP: 0.9% w/v AVP; 0.125% v/v Vintre; 0.0116% v/v Btk toxins, of the total volume of the composition, with the remainder water.
[1788] (4) Control (0.125% Vintre®). Vintre® is a surfactant that consists of 8.92% alcohol ethoxylate, and 91.08% constituents ineffective as spray adjuvants (ORO AGRI, Inc, 990 Trophy Club Dr., Trophy Club, TX 76262 USA). Vintre is commercially available from several vendors, and is a product that is well known to those having ordinary skill in the art.

[1789] Generating AVP

[1790] The Av3-variant polypeptide (AVP) evaluated was obtained as follows: briefly, a WT-Av3 peptide, having an amino acid sequence “RSCCPCYWGGCPWGQNCYPEGCSGPKV” (SEQ ID NO: 44), was used as a template, and mutated to produce a peptide having an R1K substitution, and a C-terminus deletion. The resulting mutant peptide is an AVPb peptide having the amino acid sequence

(SEQ ID NO: 47)
“KSCCPCYWGGCPWGQNCYPEGCSGPK”.

[1791] AVPb was obtained by first generating an AVP peptide expression vector was generated based on the pKLAC1 yeast expression vector (available from NEW ENGLAND BIOLABS®): AVPs were expressed as a secretion peptide with acetamidase gene expression as the selection marker. The expression vector of pLB102 was linearized by the digestion with the restriction enzyme SacII; the linear pLB102 plasmid was then transformed into K. lactis cell by electroporation; 96 of resulting positive transformation colonies were cultured. Seed culture of the production strain for inoculation of the 2 L fermentation was preceded for 24 hours in the seed medium containing 3% solulys 095K+3% glucose and 50 μg/mL Kanamycin. Then 30 mL seed culture was used to inoculate 2 L fermentation tank with 1 L batch medium containing 1 L basal salt media (BMS (g/L): Solulys 095K 40, suppressor 3519 0.1 mL, 85% phosphoric acid 13 mL, CaSO₄ 0.5, K₂SO₄ 9.1, MgSO₄·7H₂O 7.5, KOH 2.1, (NH₄)₂SO₄ 5, Dextrose 10) with 1.2% Pichia Trace metals (PTM (g/L): CuSO₄·5H₂O 6, NaI 0.08, MgSO₄·H₂O 3, NaMoO₄·2H₂O 0.2, H₃BO₃ 0.02, CoCl₂·6H₂O 0.5, ZnCl₂ 20, FeSO₄·6H₂O 65, H₂SO₄ 5 mL) and 2 mL 5% suppressor 7153. Batch phase of fermentation continued for 6 hours with controlled temperature at 27° C., pH 4.80 and dissolved oxygen at 15%. After 6 hour batch fermentation, temperature was dropped to 23.5° C. and feeding of sugar alcohol started and continued for 120 hours with temperature control at 23.5 C° for the rest of fermentation process. Feed media was fed at a gradually increased rates: 3.4 mL/hr. for 24 hours, 4.4 mL/hr. for 30 hours, 7.2 mL/hr. for 24 hours, 8.8 mL/hr. for 12 hours and 11 mL/hr. until feed medium was totally consumed. Reverse-phase HPLC was used to purify AVP from the fermentation beer (i.e., spent medium) via monolithic C18 columns using water with 0.1% Trifloroacetic acid, and acetonitrile as the mobile phase. An elution protocol using 20-40% acetonitrile was used for AVP purification, in which AVP was eluted between a range of 34-36% acetonitrile.

[1792] An exemplary method of obtaining AVPs is disclosed in PCT Application No. PCT/US2019/051093, the disclosure of which is incorporated herein by reference in its entirety.

[1793] Foliar Spray Bioassay

[1794] The effect of combining Btk toxin with Av3b-Variant Polypeptides (AVPs) was tested against the Lepidopteran species, the beet armyworm (Spodoptera exigua). Mortality of the beet armyworm was assessed when confronting the insect with either (1) AVP alone; (2) Btk toxin alone; (3) a combination of both AVP and Btk toxin; or (4) a control (0.125% Vintre, a surfactant).

[1795] To test the effect of the combinations, romaine lettuce was cut into 30 mm diameter disks, and then sterilized using a 140 ppm bleach solution; the disks were then triple rinsed. The romaine lettuce disks were then pinned to a Styrofoam board and sprayed with a given treatment; the disks were flipped, sprayed again, allowed to dry, and placed in the arena.

[1796] The arena was 32-well rearing tray containing 5 mL of 1% agar. One romaine lettuce disk was placed in each well, with a single, second instar beet armyworm per leaf disk. The trays were then placed in a 28° C. Incubator. Each treatment was tested on 12 disks, with three replicates (N=36).

[1797] First, a sublethal dose (i.e., a dose resulting in approximately 20% of the population being killed, or ˜LD₂₀) of Btk toxin was determined, to allow the observation of insecticidal peptides when combined with Btk toxin, and subsequently allow the observation of synergy between the two products.

[1798] Here, the sublethal does of Btk toxin was 800 ppm (0.8 mg/mL), which resulted in the death of 31% of the population. FIG. 3. Once the sublethal dose of Btk toxin was identified for these experiments, the dose of AVP was increased until the LD₅₀ amount was reached for the AVP+Btk toxin combination. Accordingly, the final combination compositions were as follows: (1) Low dose AVP: 0.1% w/v AVP; 0.125% v/v Vintre; 0.0116% v/v Btk toxins, of the total volume of the composition, with the remainder water; (2) Intermediate dose AVP: 0.3% w/v AVP; 0.125% v/v Vintre; 0.0116% v/v Btk toxins, of the total volume of the composition, with the remainder water; and (3) High dose AVP: 0.9% w/v AVP; 0.125% v/v Vintre; 0.0116% v/v Btk toxins, of the total volume of the composition, with the remainder water.

[1799] As shown in FIG. 3, the use of 1.1 mg/mL of AVP resulted in 5% mortality; however, when combined with 0.8 mg/mL of Btk toxin, the mortality rate increased to 50%. Similarly, when using AVP alone at a dose of 3 mg/mL, the mortality rate was 11%; however, when combined with 0.8 mg/mL of Btk toxin, the mortality rate increased to 67%. Finally, using a dose of 9 mg/mL of AVP alone resulted in a 10% mortality rate, but, when combined with Btk toxin, the mortality rate was 88%. This example demonstrates that a combination of Btk toxin and AVP results in an unexpected, synergistic effect, wherein the combination results in more than the expected additive effect.

### Example 4: Btk Toxins, Ta1b, and TVPs

[1800] The effect of combinations of (1) Btk toxin with wild-type Ta1b; or (2) Btk toxin with Ta1b-Variant Polypeptides (TVPs); were each tested against the Lepidopteran species, corn earworm (Helicoverpa zea), in an injection assay, and in a foliar bioassay.

[1801] WT-Ta1b and TVP-R9Q

[1802] The CRIPs evaluated here were WT-Ta1b, and the Ta1b-variant polypeptide, TVP-R9Q. WT-Ta1b has an amino acid sequence as follows:

“EPDEICRARMTNKEFTYKSNVCNNCGDQVAACEAECFRNDVYTACHEAQKG” (SEQ ID NO: 1); TVP-R9Q has amino acid sequence as follows:

(SEQ ID NO: 2)
“EPDEICRAQMTNKEFTYKSNVCNNCGDQVAACEAECFRNDVYTACHEA
QKG”.

[1803] To obtain the TVP-R9Q peptide, a wild-type Ta1b peptide having the amino acid sequence:

“EPDEICRARMTNKEFTYKSNVCNNCGDQVAACEAECFRNDVYTACHEAQKG” (SEQ ID NO: 1) was used as a template and mutated residue position number 9, resulting in an R9Q substitution; accordingly, TVP-R9Q has an R9Q amino acid substitution relative to wild type (SEQ ID NO: 1).

[1804] To produce WT-Ta1b and TVP-R9Q, DNA constructs comprising a nucleotide sequence operable to encode WT-Ta1b or TVP-R9Q were codon optimized and synthesized as a fusion with Kluyveromyces lactis alpha mating factor pre/pro sequence (αMF) and ligated into the NotI and HindIII restriction sites of pKlac1 (NEW ENGLAND BIOLABS®). The vector was digested with SacII to linearize and remove the bacterial Ori and selection marker, then electroporated into electrocompetent Kluyveromyces lactis cells. Multiple gene copy transformants were selected on selection plates containing acetamide as the sole nitrogen source. Clones expressing WT-Ta1b or TVP-R9Q were assessed by HPLC on a Chromolith C18 column (4.6×100 mm) and eluted at a flow rate of 2 mL min-1 and gradient of 15-33% acetonitrile over 8 min.

### Example 5: Stability Assay of WT-Ta1b and TVP-R9Q

[1805] TVP-R9Q is resistant lepidopteran gut proteases. Briefly, degradation of TVP-R9Q and WT-Ta1b was performed as follows: early fifth instar Helicoverpa zea larvae were dissected to remove the intact digestive tract from other tissues and hemolymph. To obtain the Helicoverpa gut extract (HGE), a small incision was made to the intestinal lining such that gut contents could be collected in a tube. Multiple dissections were pooled and kept on ice for immediate use, or stored at −80° C. for future use.

[1806] Wild-type Ta1b (SEQ ID NO: 1) was used as a template, and mutated at amino acid substitution at position 9, (i.e., R9; SEQ ID NO: 1) to produce a substitution of the arginine at position 9 (i.e., R9) of the wild-type amino acid sequence (SEQ ID NO: 1), with the amino acid Q (TVP-R9Q). WT-Ta1b and TVP-R9Q were confronted with Helicoverpa gut extract (HGE) to simulate digestion in the lepidopteran gut environment. Here, WT-Ta1b and TVP-R9Q were incubated with 20 μL HGE; 205 μL 30 mM Tris-HCl pH 8.8 (to maintain the alkaline pH of the Helicoverpa gut environment); and 25 μL of 15.7 mg/mL of WT-Ta1b or TVP-R9Q.

[1807] Samples of the digested Ta1b or TVP was collected at time points of 0, 20, 40, 60, 180, and 1260 minutes. To quench the digestion process, 82 μL of Tris-HCl pH 8.8, and 3 μL 25% HCl, was added to the samples, and the samples of the digested TVPs were immediately analyzed using reverse-phase HPLC to quantify the TVP peak area. As shown in FIGS. 4-5, the TVP-R9Q is stable in HGE compared to WT-Ta1b.

### Example 6: Foliar Assay of Ta1b, TVP-R9Q, and Btk Toxins

[1808] To test the effect of combinations of Btk toxins and WT-Ta1b or TVP-R9Q, romaine lettuce was cut into 30 mm diameter disks, and then sterilized using a 140 ppm bleach solution; the disks were then triple rinsed. The romaine lettuce disks were then pinned to a Styrofoam board and sprayed with a given treatment; the disks were flipped, sprayed again, allowed to dry, and placed in the arena.

[1809] The arena was 32-well rearing tray containing 5 mL of 1% agar. One romaine lettuce disk was placed in each well, with a single second instar beet armyworm per leaf disc. The trays were then placed in a 28° C. Incubator. Each treatment was tested on 12 discs, with four experimental replicates (N=48).

[1810] Treatments

[1811] Treatments were spray solution compositions consisting of the following components:
[1812] (1) WT-Ta1b, at a stock concentration: 14.51 mg/mL, was diluted to doses of 0, 1, 3, and 9 mg/mL, and combined with 0.25% v/v LoadUp surfactant, for a final formulation of either 0.0% w/v, 0.1% w/v, 0.3% w/v, or 0.9% w/v of WT-Ta1b; 0.25% v/v of LoadUp, and the remainder water.
[1813] (2) TVP-R9Q, at a stock concentration: 25.46 mg/mL, was diluted to doses of 0, 1, 3, and 9 mg/mL, and combined with 0.25% v/v LoadUp surfactant, for a final formulation of either 0.0% w/v, 0.1% w/v, 0.3% w/v, or 0.9% w/v of TVP-R9Q; 0.25% v/v of LoadUp, of the total volume of the composition, with the remainder water.
[1814] (3) 0.25% LoadUp surfactant (control). The “LoadUp” used here and in all the enumerated treatments above and below, is a surfactant consisting of the following: 56.1.0% alkyl phenol ethoxylate, propylene glycol, alkyl amine ethoxylate, and sulfuric acid; and 43.9% other constituents ineffective as spray adjuvants. LoadUp is available from J. R. Simplot Company (P.O. Box 70013, Boise, ID 83707 USA).
[1815] (4) Btk toxins (15 ppm Btk toxins, or 15 μL/mL, or 0.015 mL/mL). In this treatment, the formulation consisted of 0.0015% v/v Btk toxins, of the total volume of the composition, with the remainder water.

[1816] To evaluate Btk toxins, the commercial product Leprotec® was used. Leprotec® consists of 14.49% Bacillus thuringiensis ssp. kurstaki (Btk) strain EVB-113-19 fermentation solids, spores, and insecticidal toxins, with a potency of 17,500 Cabbage Looper Units (CLU) per mg of product (equivalent to 76 billion CLU per gallon of product); and 85.51% other/inactive ingredients. Leprotec® is available from AEF Global Inc., 925 des calfats, US-QC, Levis, G6Y9E8, Canada; website: http://www.aefglobal.com/en/; CAS number: 68038-71-1; lot number: 23J19M.).

[1817] In order to select the amount of Leprotec® to use in these experiments (i.e., 15 ppm), a sublethal dose (i.e., a dose resulting in approximately 20% of the population being killed, or ˜LD₂₀) of Leprotec® was established for multiple species. This initial test revealed the sublethal doses (˜LD₂₀) of Leprotec® for the following species: cabbage loopers=2.5 ppm; fall armyworm=383 ppm; beet armyworm=87 ppm; and corn earworm=15 ppm.

[1818] The initial work to establish the sublethal dose of Leprotec® was performed in order to allow an observation of combined effect of Leprotec® with Ta1b or TVP-R9Q, and subsequently allow the determination of whether a greater than additive effect is shown in combinations thereof.
[1819] (5) WT-Ta1b+Btk toxins. Here, WT-Ta1b and Btk toxins were combined. A stock concentration of WT-Ta1b (14.51 mg/mL), was diluted to doses of 0, 1, 3, and 9 mg/mL, and combined with 0.25% v/v LoadUp surfactant, and 15 ppm Btk toxins (Leprotec®; see above). This resulted in a final composition of either 0.0% w/v, 0.1% w/v, 0.3% w/v, or 0.9% w/v of WT-Ta1b; 0.25% v/v of LoadUp; 0.0015% v/v Btk toxins, of the total volume of the composition, with the remainder water.
[1820] (6) TVP-R9Q+Btk toxins. Here, TVP-R9Q and Btk toxins were combined. A stock concentration of TVP-R9Q (25.46 mg/mL), was diluted to doses of 0, 1, 3, and 9 mg/mL, and combined with 0.25% v/v LoadUp surfactant, and 15 ppm Btk toxins (Leprotec®; see above). This resulted in a final composition of either 0.0% w/v, 0.1% w/v, 0.3% w/v, or 0.9% w/v of WT-Ta1b; 0.25% v/v of LoadUp; 0.0015% v/v Btk toxins, of the total volume of the composition, with the remainder water.

[1821] The foregoing treatments were then sprayed on the leaf disks.

[1822] The results of foliar bioassay are shown in FIGS. 6-9. Here, when TVP-R9Q was combined with Btk toxin, it resulted in decreased defoliation and increased mortality; and, these effects on defoliation and mortality were better than TVP-R9Q alone, Ta1b alone, or Ta1b in combination with Btk toxins.

[1823] As shown in FIG. 9, the LD 50 for TVP-R9Q combined with a sublethal dose of Leprotec, in neonate corn earworm, was 2 ppt (Std. error=0.9). FIG. 9. Accordingly, the TVP-R9Q mutation causes a major increase in insecticidal activity relative to WT-Ta1b when ingested.

### Example 7: Diet Incorporation Assay: Btt Toxin and U+2-ACTX-Hv1a

[1824] Combinations of Bacillus thuringiensis var. tenebrionis (Btt) toxins and U+2-ACTX-Hv1a were evaluated for their insecticidal activity in a diet incorporation assay against Alphitobius diaperinus (darkling beetle). Briefly, treatments of either: (1) U+2-ACTX-Hv1a alone; (2) Btt toxin alone; (3) a combination of both U+2-ACTX-Hv1a and Btt toxin; or (4) an untreated control (water).

[1825] The Darkling Beetle, Alphitobius diaperinus (of the order Coleoptera: family Tenebrionidae), also known as the lesser mealworm in its larval stages, is a serious pest in poultry houses. The larvae of the beetle eat chicken food, manure, and carcasses on the floor. Additionally, larvae are a vector disease when eaten by the chickens. And, the larvae burrow into Styrofoam insulation, reducing thermal efficiency of buildings.

[1826] The effect of the dietary incorporation of a combination of Bacillus thuringiensis var. tenebrionis toxins (Btt toxin) with U+2-ACTX-Hv1a was tested against the Coleopteran species, the Darkling Beetle (Alphitobius diaperinus). Mortality of the Darkling beetle was assessed after the incorporation of one of the following treatments into the insect's diet: (1) U+2-ACTX-Hv1a alone; (2) Btt toxin alone; (3) a combination of both U+2-ACTX-Hv1a and Btt toxin; or (4) an untreated control (water). Treatments are described below.

[1827] Treatments

[1828] Treatments were compositions consisting of the following components:
[1829] (1) Btt toxins. To evaluate Btt toxin, NOVODOR® FC from VALENT® U.S.A. LLC Agricultural Products was used. NOVODOR® FC (or flowable concentrate) consists of 10% Bacillus thuringiensis ssp. tenebrionis strain NB-176 fermentation solids and solubles, with a potency of 15,000 Leptinotarsa Units (LTU) per gram of product (equivalent to 16.3 Million LTU's per quart of product); and 90% other/inactive ingredients. NOVODOR® FC consisting of Bacillus thuringiensis ssp. tenebrionis strain NB-176 fermentation solids and solubles, is commercially available from VALENT® U.S.A. LLC Agricultural Products, 1333 N California Blvd, Suite 600, US-CA, Walnut Creek, 94596-8025, U.S.A., website: https://www.valent.com/; product code number: 96017; list number: 60220; lot number: 235-222-3L-00.
[1830] (2) U+2-ACTX-Hv1a (1 mg/mL). U+2-ACTX-Hv1a (also referred to as “Spear”) having an amino acid sequence of “GSQYCVPVDQPCSLNTQPCCDDATCTQERNENGHTVYYCRA” (SEQ ID NO: 61) was obtained according to the methods described in Example 1, albeit in a liquid formulation.
[1831] (3) Btt toxins+U+2-ACTX-Hv1a. Bti toxins and U+2-ACTX-Hv1a were prepared as described above, and combined. The final combination compositions were as follows:
[1832] Low dose U+2-ACTX-Hv1a: 0.1% w/v U+2-ACTX-Hv1a; and 0.0040% v/v Btt toxins, of the total volume of the composition, with the remainder being artificial southern corn rootworm diet (Frontier Agricultural Services #F9800B).
[1833] Intermediate dose U+2-ACTX-Hv1a: 0.3% w/v U+2-ACTX-Hv1a; and 0.0040% v/v Btt toxins, of the total volume of the composition, with the remainder being artificial southern corn rootworm diet (Frontier Agricultural Services #F9800B).
[1834] High dose U+2-ACTX-Hv1a: 0.8% w/v U+2-ACTX-Hv1a; and 0.0040% v/v Btt toxins, of the total volume of the composition, with the remainder being artificial southern corn rootworm diet (Frontier Agricultural Services #F9800B).
[1835] (4) Control. Water

[1836] Diet Incorporation Assay

[1837] To test the effect of the combinations, an arena was created comprising a 128 well bioassay tray, into which two (N=2), first-instar lesser mealworms were added (i.e., 2 mealworms per well). The mealworms were then provided a meal consisting of Southern Corn Rootworm (SCR) diet (Frontier Scientific, Newark, DE 19713, product No. F9800B) mixed with one of the treatments. The meal consisted of 1 mL of agar-based SCR diet, mixed with one of the treatments. Stock meal mixtures were made by combining 15 mL of SCR diet held at 65° C. with 10 mL of 2.5× treatment solution. The wells were then secured with vented lid, and the tray was placed in incubator with the following environmental conditions: 32° C.; 50-70% relative humidity; and no lights. Four replicates for each treatment condition were completed (N=4).

[1838] Next, a sublethal dose (i.e., a dose resulting in approximately 20% of the population being killed, or ˜LD₂₀) of Btt toxin was determined, to allow the observation of insecticidal peptides when combined with Btt toxin, and subsequently allow the observation of synergy between the two products.

[1839] Here, the sublethal does of Btt toxin was 400 ppm (0.4 mg/mL), which resulted in the death of 18% of the population. FIG. 10. Once the sublethal dose of Btt toxin was identified for these experiments, the dose of U+2-ACTX-Hv1a was increased until the LD₅₀ amount was reached for the U+2-ACTX-Hv1a+Btt toxin combination. Accordingly, the final combination compositions were as follows: (1) Low dose U+2-ACTX-Hv1a: 0.1% w/v U+2-ACTX-Hv1a; and 0.0040% v/v Btt toxins, of the total volume of the composition, with the remainder being artificial southern corn rootworm diet (Frontier Agricultural Services #F9800B); (2) Intermediate dose U+2-ACTX-Hv1a: 0.3% w/v U+2-ACTX-Hv1a; and 0.0040% v/v Btt toxins, of the total volume of the composition, with the remainder being artificial southern corn rootworm diet (Frontier Agricultural Services #F9800B); and (3) High dose U+2-ACTX-Hv1a: 0.8% w/v U+2-ACTX-Hv1a; and 0.0040% v/v Btt toxins, of the total volume of the composition, with the remainder being artificial southern corn rootworm diet (Frontier Agricultural Services #F9800B).

[1840] As shown in FIG. 10, the use of 1 mg/mL of U+2-ACTX-Hv1a alone resulted in 20% mortality; however, when combined with 0.4 mg/mL of Btt toxin, the mortality rate increased to 50%. Likewise, when using U+2-ACTX-Hv1a alone at a dose of 3 mg/mL, the mortality rate was 44%; however, when combined with 0.4 mg/mL of Btt toxin, the mortality rate increased to 91%. Finally, using a dose of 8 mg/mL of U+2-ACTX-Hv1a alone resulted in a 74% mortality rate. However, when 8.0 mg/mL of U+2-ACTX-Hv1a was combined with 0.4 mg/mL of Btt toxin, the mortality rate increased to 95%. This example demonstrates that a combination of Btt toxin and U+2-ACTX-Hv1a results in an unexpected, synergistic effect, wherein the combination results in more than the expected additive effect.

### Example 8: Spray Assay: Btt Toxin and U+2-ACTX-Hv1a

[1841] A spray assay was performed in order to determine the effect of using a spray containing Btt toxin with U+2-ACTX-Hv1a on Colorado potato beetle (Leptinotarsa decemlineata) mortality.

[1842] Approximately 16 first-instar Colorado potato beetles were placed on filter paper (Whatman #3, 90 mm diameter), contained in an inverted petri dish (25×100 mm). Next a mini-spray bottle (Qosmedix) was used to spray the Colorado potato beetles with 2 mL of treatment solution containing the following: water; 10 ppT (0.01 mg/mL of U+2-ACTX-Hv1a; and 20 ppT (0.02 mg/mL) of Btt toxin. The petri dish was then sealed with parafilm, and stored in the incubator (28° C.; 50% relative humidity; lights on) for 4 hours. Beetles were sprayed with (1) U+2-ACTX-Hv1a alone; (2) Btt toxin alone; (3) a combination of both U+2-ACTX-Hv1a and Btt toxin; or (4) an untreated control (water). Treatments were the same as those described in Example 8, albeit formulated into a spray form.

[1843] Following the spray treatment, individual beetles were transferred to the wells of a rearing tray, where they were provided 1 mL per well of an artificial Colorado potato beetle diet (Frontier Scientific, Newark, DE 19713, product No. F9380B) with formaldehyde. Mortality rates were measured every 24 hours for the next 4 days.

[1844] As shown in FIG. 11, after 24 hours (1 day) beetles treated with U+2-ACTX-Hv1a alone had a 4% mortality rate. Beetles treated with Btt toxin alone possessed a 2% mortality rate. In stark contrast to the mortality rates of either U+2-ACTX-Hv1a or Btt toxin alone, combining U+2-ACTX-Hv1a with Btt toxin resulted in a 79% mortality rate after 24 hours. This pattern of synergy continued at subsequent time points. At 48 hours (2 days), beetles treated with U+2-ACTX-Hv1a alone possessed a 9% mortality rate. Beetles treated with Btt toxin alone possessed a 6% mortality rate. By combining U+2-ACTX-Hv1a with Btt toxin, the mortality rate increased to 81% at 48 hours. At 72 hours (3 days), beetles treated with U+2-ACTX-Hv1a alone possessed a 7% mortality rate. Beetles treated with Btt toxin alone possessed a 23% mortality rate. By combining U+2-ACTX-Hv1a with Btt toxin, the mortality rate increased to 94% at 72 hours. Finally, at 96 hours (4 days), beetles treated with U+2-ACTX-Hv1a alone possessed a 19% mortality rate. Beetles treated with Btt toxin alone possessed a 68% mortality rate. By combining U+2-ACTX-Hv1a with Btt toxin, the mortality rate increased to 91% at 96 hours.

### Example 9: Photorhabdus luminescens Toxin Complex an U+2-ACTX-Hv1a

[1845] Photorhabdus luminescens is highly virulent insect pathogen vectored by the nematode Heterorhabditis bacteriophora. The bacterium produces and secretes large protein complexes known as toxin complexes. The protein complex is referred to as “Toxin complex a” or “Tca.” Tca is composed of four different proteins: TcaA, TcaB, TcaC, and TcaZ. Here, combinations of Photorhabdus luminescens toxins and U+2-ACTX-Hv1a were assessed for the their insecticidal activity.

[1846] Treatments
[1847] (1) Photorhabdus luminescens toxins (4.75% v/v). Toxin complex a (Tca) was obtained by sourcing P. luminescens from American Type Culture Collection (ATCC), 10801 University Blvd. Manassas, VA 20110, USA. P. luminescens cells (Product number 2999; Strain: Hb [DSM 3368, HB1, NCIB 12670]; Contributors: (Thomas and Poinar), Boemare et. al.) were cultured according to the manufacturer's recommendations. Toxin complex was purified by spinning down the cells, and concentrating the culture broth over a 30 molecular-weight cut-off (mwco) filter. The Tca complex extract used here was composed of four different proteins: TcaA (SEQ ID NO: 616), TcaB (SEQ ID NO: 617), TcaC (SEQ ID NO: 618), and TcaZ (SEQ ID NO: 619).
[1848] (2) U+2-ACTX-Hv1a. U+2-ACTX-Hv1a having an amino acid sequence of “GSQYCVPVDQPCSLNTQPCCDDATCTQERNENGHTVYYCRA” (SEQ ID NO: 61) was obtained from SPEAR®-T Liquid Concentrate (Lot No. 14143019 Vestaron®, 4717 Campus Drive, Kalamazoo, MI 49008 USA).
[1849] (3) Photorhabdus luminescens toxins+U+2-ACTX-Hv1a. Photorhabdus luminescens toxins and U+2-ACTX-Hv1a were prepared/obtained as described in the treatments above, and combined. The final combination composition was as follows: 1% w/v U+2-ACTX-Hv1a; and 4.75% v/v Photorhabdus luminescens toxin complex extract, of the total volume of the composition, with the remainder being water.
[1850] (4) Control. Water.

[1851] Diet Incorporation Assay

[1852] Diet incorporation bioassays were performed on Corn earworms (Helicoverpa zea). The bioassay was performed in 128-well trays. Each well was filled with 200 μL of agar-based general lepidopteran diet infused with a given treatment (N=16, wells per treatment). One neonate corn earworm (Helicoverpa zea) was placed in each well and their survival was evaluated over four days. The foregoing treatments were applied as follows:
[1853] (a) Water;
[1854] (b) Toxin complex alone (4.75% v/v);
[1855] (c) 10 mg/mL U+2-ACTX-Hv1a (1% w/v); and
[1856] (d) Toxin complex (4.75% w/v) with 10 mg/mL U+2-ACTX-Hv1a (1% w/v).

[1857] As shown in FIG. 12, after 4 days, corn earworm larvae treated with Tca alone had a mortality of 13%. Corn earworms treated with U+2-ACTX-Hv1a alone had a mortality of 19%. In stark contrast to the mortality rates of either Tca or U+2-ACTX-Hv1a alone, combining U+2-ACTX-Hv1a with Tca toxin resulted in a 44% mortality rate after 4 days.

[1858] The results here provides evidence of synergy between the Photorhabdus luminescens toxin complex and U+2-ACTX-Hv1a against Corn Earworm; i.e., the example here demonstrates that a combination of Tca and U+2-ACTX-Hv1a results in an unexpected, synergistic effect, wherein the combination results in more than the expected additive effect.

### Example 10: Snowdrop Lectin (GNA) and ACTX

[1859] Snowdrop lectin or Galanthus nivalis (GNA) is a mannose binding protein. Here, Corn earworm (CEW) (Helicoverpa zea) neonates were confronted with solutions of GNA and/or U+2-ACTX-Hv1a to assess mortality after feeding.

[1860] Treatments (1) Snowdrop lectin (GNA).

[1861] GNA having an amino acid sequence:

“MAKASLLILATIFLGVITPSCLSENILYSGETLPTGGFLSSGSFVFIIVIQEDCNLVLYNV DKPIWATNTGGLSSDCSLSMQNDGNLVVFTPSNKPIWASNTDGQNGNYVCILQKDR NVVIYGTNRWATGTYTGAVGIPESPPSEKYPSAGKIKLVTAK” and as set forth in SEQ ID NO: 35, was obtained from Vector Laboratories (3390 South Service Rd, Burlington, ON L7N 3J5, Canada), Catalog no. L-1240. Lot no. ZD1016. U+2-ACTX-Hv1a was obtained as described herein.
[1862] (2) U+2-ACTX-Hv1a. U+2-ACTX-Hv1a having an amino acid sequence of “GSQYCVPVDQPCSLNTQPCCDDATCTQERNENGHTVYYCRA” (SEQ ID NO: 61) was obtained from SPEAR®-T Liquid Concentrate (Lot No. 14143019 Vestaron®, 4717 Campus Drive, Kalamazoo, MI 49008 USA).
[1863] (3) GNA+U+2-ACTX-Hv1a. GNA and U+2 were prepared/obtained as described in the treatments above, and combined. The final combination composition was as follows: 0.5% w/v U+2-ACTX-Hv1a; and 0.25% w/v GNA, of the total volume of the composition, with the remainder being water.
[1864] (4) Control. Water.

[1865] Diet Incorporation Assay

[1866] A diet incorporation assay was performed as follows: first droplet bioassay arenas were constructed by creating 32 well assay trays containing parafilm on top of agar. Next, 3 μL droplets (3×) were placed on parafilm with 5 CEW neonates. Droplets were replenished daily. This was replicated 4 times per treatment.

[1867] The foregoing treatments were applied as follows:
[1868] (a) 2.5 mg/mL GNA (0.25% w/v); 5 mg/mL U+2-ACTX-Hv1a (0.5% w/v);
[1869] (b) 0 mg/mL GNA (0% w/v); 5 mg/mL U+2-ACTX-Hv1a (0.5% w/v);
[1870] (c) 2.5 mg/mL GNA (0.25% w/v); 0 mg/mL U+2-ACTX-Hv1a (0% w/v); and
[1871] (d) 0 mg/mL GNA (0% w/v); with 0 mg/mL U+2-ACTX-Hv1a (0% w/v) (control).

[1872] Larvae mortality was assessed daily for 3 days. The mortality rate on day three of the bioassay is presented in FIG. 13.

[1873] As shown in FIG. 13, the control had a baseline mortality rate of 20%. U+2-ACTX-Hv1a alone, at a dose 5 mg/mL, resulted in 45% mortality. GNA alone had a mortality rate of 15%. When the baseline mortality rate is subtracted, the mortality rate of U+2-ACTX-Hv1a alone changes to −25%, whereas the mortality rate of GNA falls to around zero. However, the combination of U+2-ACTX-Hv1a (5 mg/mL) and GNA (2.5 mg/mL) together had a synergistic effect, resulting in 75% mortality; and, when normalized to account for the baseline mortality rate, the mortality rate for the combination of U+2-ACTX-Hv1a (5 mg/mL) and GNA (2.5 mg/mL) comes to −55%—or roughly double the amount of U+2-ACTX-Hv1a alone.

### Example 11: Chitinase and U+2-ACTX-Hv1a

[1874] To evaluate the chitinases, Fall Armyworms (Spodoptera frugiperda) were confronted with doses of U+2-ACTX-Hv1a and/or chitinase to test their effects alone and in combination.

[1875] Treatments
[1876] (1) Chitinase. To evaluate chitinases, a chitinase from Trichoderma viride was used. A chitinase having an amino acid sequence as set forth in SEQ ID NO: 620 was obtained from Sigma Aldrich (3050 Spruce Street, St Louis, MO 63103 U.S.A) (Product No. C8241-25UN; Lot no. 128M4015V).
[1877] (2) U+2-ACTX-Hv1a. U+2-ACTX-Hv1a having an amino acid sequence of “GSQYCVPVDQPCSLNTQPCCDDATCTQERNENGHTVYYCRA” (SEQ ID NO: 61) was obtained from SPEAR®-T Liquid Concentrate (Lot No. 14143019 Vestaron®, 4717 Campus Drive, Kalamazoo, MI 49008 USA).
[1878] (3) Chitinase+U+2-ACTX-Hv1a. Chitinase and U+2-ACTX-Hv1a were prepared/obtained as described in the treatments above, and combined. The final combination composition was as follows: 0.5% w/v U+2-ACTX-Hv1a; 0.01% w/v chitinase, of the total volume of the composition, with the remainder being water.
[1879] (4) Control. Water.

[1880] Diet Incorporation Assay

[1881] Three droplets (3 μL each) containing the following ingredient concentrations were presented to five neonate Fall armyworm (Spodoptera frugiperda) larvae in trays of 32-well trays:
[1882] (a) Chitinase 0 μL/L (0% w/v); U+2-ACTX-Hv1a 0 mg/mL (0% w/v); Sucrose (10% w/v);
[1883] (b) Chitinase 100 μL/L (0.01% w/v); U+2-ACTX-Hv1a 0 mg/mL (0% w/v); Sucrose (10% w/v);
[1884] (c) Chitinase 0 μL/L (0% w/v); U+2-ACTX-Hv1a 5 mg/mL (0.5% w/v); Sucrose (10% w/v); and
[1885] (d) Chitinase 100 μL/L (0.01% w/v); U+2-ACTX-Hv1a 5 mg/mL (0.5% w/v); Sucrose (10% w/v).

[1886] Mortality was then assessed after three days.

[1887] As shown in FIG. 14, the untreated control had a mortality of 35%. This may have been a result of the use of fragile neonates, and/or reflective of the typical stresses and/or food or nutrient deprivation common in diet incorporation studies using insects. Here, chitinase alone had no effect relative to the control treatment (i.e., mortality rate of 35%). Accordingly, the effect of chitinase alone could not be said to have caused an increase in mortality over the control. On the other hand, U+2-ACTX-Hv1a exhibited a 75% mortality rate on the insects. And, a greater than additive effect on mortality was observed (i.e., 85%) in the combination treatment of chitinase and U+2-ACTX-Hv1a.

[1888] Therefore, the example here demonstrates that a combination of chitinase and U+2-ACTX-Hv1a results in an unexpected, synergistic effect, wherein the combination results in more than the expected additive effect.

### Example 12: Insect Growth Regulators (Azadirachtin) and U+2-ACTX-Hv1a

[1889] Insect growth regulators (IGRs) act by interfering with larval insects' ability to molt to the next instar. The mechanism of action (MoA) of IGRs is interference and/or inhibition of chitin synthases.

[1890] To test the foregoing hypothesis, Corn earworm (CEW) (Helicoverpa zea) neonates were confronted with Azadirachtin, and combinations of Azadirachtin and U+2-ACTX-Hv1a. Azadirachtin is a formulated insecticide derived from Neem oil extract, which has insecticidal activity. Azadirachtin has a chemical formula: C₃₅H₄₄O₁₆, and a chemical structure as shown in FIG. 15.

[1891] Treatments
[1892] (1) Azadirachtin. Here, Azadirachtin was obtained from the commercially available product, NEEMIX® 4.5, which comprises the active ingredient, Azadirachtin. NEEMIX® 4.5 (Item code: 168600; Lot number: 72371909; CAS number: 11141-17-6), was obtained from Certis USA L.L.C. (9145 Guilford Road Suite 175 Columbia, MD 21046).
[1893] (2) U+2-ACTX-Hv1a. U+2-ACTX-Hv1a having an amino acid sequence of “GSQYCVPVDQPCSLNTQPCCDDATCTQERNENGHTVYYCRA” (SEQ ID NO: 61) was obtained from SPEAR®-T Liquid Concentrate (Lot No. 14143019 Vestaron®, 4717 Campus Drive, Kalamazoo, MI 49008 USA).
[1894] (3) Azadirachtin+U+2-ACTX-Hv1a. Azadirachtin and U+2-ACTX-Hv1a were prepared/obtained as described in the treatments above, and combined. The final combination composition was as follows: 1% w/v U+2-ACTX-Hv1a; 0.008% w/v Azadirachtin, of the total volume of the composition, with the remainder being water.
[1895] (4) Control. Water.

[1896] Diet Incorporation Assay

[1897] The foregoing treatments were applied as follows:
[1898] (a) 0 μL/L Azadirachtin (0% v/v); 0 mg/mL U+2-ACTX-Hv1a (0% w/v) (control);
[1899] (b) 80 μL/L Azadirachtin (0.008% v/v); 0 mg/mL U+2-ACTX-Hv1a (0% w/v);
[1900] (c) 0 μL/L Azadirachtin (0% v/v); 10 mg/mL U+2-ACTX-Hv1a (1% w/v); and
[1901] (c) 80 μL/L Azadirachtin (0.008% v/v); 10 mg/mL of U+2-ACTX-Hv1a (1% w/v).

[1902] Bioassay arenas consisted of 128-well trays. Each well was filled with 200 μL of agar-based general lepidopteran diet infused with the above treatments; 16 wells per treatment were evaluated (N=16). One neonate corn earworm (Helicoverpa zea) was placed in each well and their survival was evaluated after four days.

[1903] As shown in FIG. 16, the use of Azadirachtin alone resulted in 37.5% mortality. U+2-ACTX-Hv1a alone resulted in 18.75% mortality. However, the combination of U+2-ACTX-Hv1a and Azadirachtin resulted in 81.25% mortality. Thus, higher corn earworm mortality was observed with all treatments of U+2-ACTX-Hv1a and Azadirachtin, as opposed to Azadirachtin alone.

[1904] Therefore, this example demonstrates that a combination of Azadirachtin and U+2-ACTX-Hv1a results in an unexpected, synergistic effect, wherein the combination results in more than the expected additive effect.

### Example 13: Miscellaneous Non-Specific Inhibitors (Boric Acid) and U+2-ACTX-Hv1a

[1905] Miscellaneous non-specific (multi-site) inhibitors include borates such as borax, boric acid, disodium octaborate, sodium borate, and sodium metaborate. To evaluate the effect of miscellaneous non-specific inhibitors, boric acid and/or U+2-ACTX-Hv1a were evaluated on Lesser mealworm (Alphilobius diaperinus) neonates.

[1906] Treatments
[1907] (1) Boric acid. Boric acid (chemical formula: H₃BO₃) was obtained from ThermoFisher Scientific via the distributor VWR International, Inc. (Goshen Parkway 1310, P.O. Box 2656 West Chester, PA 19380-0906 www.vwr.com) (Code: 315181000; CAS 10043-35-3; EC: 233-139-2; Lot: A0254726).
[1908] (2) U+2-ACTX-Hv1a. U+2-ACTX-Hv1a having an amino acid sequence of “GSQYCVPVDQPCSLNTQPCCDDATCTQERNENGHTVYYCRA” (SEQ ID NO: 61) was obtained from SPEAR®-T Liquid Concentrate (Lot No. 14143019 Vestaron®, 4717 Campus Drive, Kalamazoo, MI 49008 USA).
[1909] (3) Boric acid+U+2-ACTX-Hv1a. Boric acid and U+2-ACTX-Hv1a were obtained as described above and combined. The final combination composition consisted of the following: 0.1% w/v U+2-ACTX-Hv1a; and 0.25% w/v boric acid, of the total volume of the composition, with the remainder being water.
[1910] (4) Control. Water.

[1911] Diet Incorporation Assay

[1912] Treatment solutions and concentrations were applied as follows:
[1913] (a) 0 mg/mL U+2-ACTX-Hv1a (0% w/v); 0 mg/mL boric acid (0% w/v) (control);
[1914] (b) 0 mg/mL U+2-ACTX-Hv1a (0% w/v); 2.5 mg/mL boric acid (0.25% w/v);
[1915] (c) 1 mg/mL U+2-ACTX-Hv1a (0.1% w/v); 0 mg/mL boric acid (0% w/v); and
[1916] (d) 1 mg/mL U+2-ACTX-Hv1a (0.1% w/v); 2.5 mg/mL boric acid (0.25% w/v).

[1917] Bioassay arenas were performed in 128-well trays. Each well was filled with 1 mL of agar-based southern corn rootworm diet infused with one of the above treatments. Sixteen wells per treatment was filled (N=16). One neonate lesser mealworm (Alphitobius diaperinus) was then placed in each well, and their survival was evaluated over four days.

[1918] As shown in FIG. 17, boric acid alone resulted in a mortality rate of 10.3%, whereas U+2-ACTX-Hv1a alone resulted in a mortality rate of 20%. In stark contrast, however, to the mortality rates of either boric acid or U+2-ACTX-Hv1a alone, the combination of boric acid and U+2-ACTX-Hv1a resulted in a mortality rate of 68.75%.

[1919] Therefore, this example demonstrates that a combination of boric acid and U+2-ACTX-Hv1a results in an unexpected, synergistic effect, wherein the combination results in more than the expected additive effect.

### Example 14: Entomopathogenic Fungi and U+2-ACTX-Hv1a

[1920] Beauveria bassiana is an entomopathogenic fungus that infects a broad range of insects. The insecticidal activity of Beauveria bassiana likely comes from compounds it secretes, which in turn degrades the insect cuticle. One of the insecticidal compounds secreted by B. bassiana is beauvericin. There are three species of beauvericin with purported insecticidal activity: (1) beauvericin (C₄₅H₅₇N₃O₉); (2) beauvericin A (C₄₆H₅₉N₃O₉); and (3) beauvericin B (C₄₇H₆₁N₃O₉).

[1921] Without being bound to any particular theory, it is hypothesized that, if ingested, the compounds produced by B. bassiana in combination with the CRIPs of the present invention and described herein, may result in the increased bioavailability and/or the insecticidal effect of CRIPs, beauvericin, and/or combinations thereof. To evaluate the foregoing hypothesis, Codling Moths (Cydia pomonella) were confronted with doses of U+2-ACTX-Hv1a and/or beauvericin to test their effects alone and in combination.

[1922] Treatments
[1923] (1) Beauveria bassiana toxins. To test Beauveria bassiana, and the toxins, spores, and/or proteins therefrom, BIOCERES® WP was used. BIOCERES® WP is a formulated product comprising 20% Beauveria bassiana strain ANT-03 spores; and 80% other/inactive ingredients. BIOCERES® WP (Lot number: 19206-LDBC-719-03; CAS: 63428-82-0) is commercially available from Anatis Bioprotection Inc., 278, rang Saint-André St-Jacques-le-Mineur, Québec J0J 1Z0, Canada.
[1924] (2) U+2-ACTX-Hv1a. U+2-ACTX-Hv1a having an amino acid sequence of “GSQYCVPVDQPCSLNTQPCCDDATCTQERNENGHTVYYCRA” (SEQ ID NO: 61) was obtained from SPEAR®-T Liquid Concentrate (Lot No. 14143019 Vestaron®, 4717 Campus Drive, Kalamazoo, MI 49008 USA).
[1925] (3) Beauveria bassiana toxins+U+2-ACTX-Hv1a. Beauveria bassiana toxins and U+2-ACTX-Hv1a were obtained as described above and combined. The final combination composition consisted of the following: 0.2% w/v U+2-ACTX-Hv1a; and 0.12% w/v Beauveria bassiana toxins, of the total volume of the composition, with the remainder being water.
[1926] (4) Control. Water.

[1927] Diet Incorporation Assay

[1928] The foregoing treatments were applied as follows:
[1929] (a) 0 mg/mL Beauveria bassiana toxins (0% w/v); 0 mg/mL of U+2-ACTX-Hv1a (0% w/v) (control);
[1930] (b) 1.2 mg/mL Beauveria bassiana toxins (0.12% w/v); 0 mg/mL of U+2-ACTX-Hv1a (0% w/v);
[1931] (c) 0 mg/mL Beauveria bassiana toxins; 2 mg/mL of U+2-ACTX-Hv1a (0.2% w/v); and
[1932] (d) 1.2 mg/mL Beauveria bassiana toxins (0.12% w/v); 2 mg/mL of U+2-ACTX-Hv1a (0.2% w/v).

[1933] Bioassay arenas were performed in 128-well trays. Each well was filled with 200 μL of agar-based general lepidopteran diet infused with one of the above treatments. Sixteen wells per treatment was filled (N=16 well per treatment). One neonate codling moth (Cydia pomonella) was then placed in each well, and survival was evaluated over seven days.

[1934] As shown in FIG. 18, the treatment with 0 mg/mL of BIOCERES® WP with 0 mg/mL of U+2-ACTX-Hv1a (control) resulted in 18.75% mortality. The treatment consisting of 1.2 mg/mL of BIOCERES® WP with 0 mg/mL of U+2-ACTX-Hv1a resulted in no mortality. The treatment with 0 mg/mL of BIOCERES® WP with 2 mg/mL of U+2-ACTX-Hv1a had the same mortality as the control (18.75%). Surprisingly, the treatment combining 1.2 mg/mL of BIOCERES® WP with 2 mg/mL of U+2-ACTX-Hv1a resulted in a 50% mortality rate.

[1935] Therefore, this example demonstrates that a combination of BIOCERES® WP and U+2-ACTX-Hv1a results in an unexpected, synergistic effect, wherein the combination results in more than the expected additive effect.

### Example 15: Baculovirus and U+2-ACTX-Hv1a

[1936] Baculoviridae are a family of viruses specific to arthropods. Within the Baculoviridae are a genus known as Betabaculovirus comprising 26 species, including Cydia pomonella granulovirus. Cydia pomonella granulovirus (CpGV) is a virus of, inter alia, Cydia pomonella (commonly known as the Codling moth). Codling moth larvae must ingest virus occlusion bodies (OB) of the Cydia pomonella granulovirus to become infected. Occlusion bodies are protein lattices or matrices that surround and protect infectious nucleic acid particles.
[1937] (1) Cydia pomonella granulovirus (CpGV). To test Cydia pomonella granulovirus, MADEX® HP was used. MADEX® HP is manufactured by Andermatt Biocontrol AG (Stahlermatten 6, CH-6146 Grossdietwil, Switzerland;
[1938] https://www.andermattbiocontrol.com/index.html); and distributed in the USA by Certis USA LLC (9145 Guilford Road, Suite 175 Columbia, MD 21046) (https://www.certisusa.com/). MADEX® HP (EPA Reg. No. 69553-1; EPA Est. No. 70051-CA-001; Lot No. 31240799) consists of the following ingredients: 0.06% Cydia pomonella granulovirus isolate V22; and 99.94% other/inactive ingredients.
[1939] (2) U+2-ACTX-Hv1a. U+2-ACTX-Hv1a having an amino acid sequence of “GSQYCVPVDQPCSLNTQPCCDDATCTQERNENGHTVYYCRA” (SEQ ID NO: 61) was obtained from SPEAR®-T Liquid Concentrate (Lot No. 14143019 Vestaron®, 4717 Campus Drive, Kalamazoo, MI 49008 USA).
[1940] (3) CpGV+U+2-ACTX-Hv1a. CpGV and U+2-ACTX-Hv1a were obtained as described above and combined. The final combination composition consisted of the following: 0.2% w/v U+2-ACTX-Hv1a; and 0.0.00585% w/v CpGV, of the total volume of the composition, with the remainder being water.
[1941] (4) Control. Water.

[1942] Diet Incorporation Assay

[1943] The foregoing treatments were applied as follows:
[1944] (a) 0 μL/L of CpGV (0% w/v); 0 mg/mL of U+2-ACTX-Hv1a (0% w/v) (control);
[1945] (b) 58.5 μL/L of CpGV (0.00585% w/v); 0 mg/mL of U+2-ACTX-Hv1a (0% w/v);
[1946] (c) 0 μL/L of CpGV (0% w/v); 2 mg/mL of U+2-ACTX-Hv1a (0.2% w/v); and
[1947] (d) 58.5 μL/L of CpGV (0.00585% w/v); 2 mg/mL of U+2-ACTX-Hv1a (0.2% w/v).

[1948] Bioassay arenas were performed in 128-well trays. Each well was filled with 200 μL of agar-based general lepidopteran diet infused with the above treatments. Sixteen wells per treatment were then filled (N=16, per treatment). One neonate Codling moth (Cydia pomonella) was then placed in each well and their survival was evaluated over two days.

[1949] As shown in FIG. 19, both the treatments of 0 μL/L of MADEX® HP with 0 mg/mL of U+2-ACTX-Hv1a (control), and 58.5 μL/L of MADEX® HP with 0 mg/mL of U+2-ACTX-Hv1a, resulted in zero mortality. Using 2 mg/mL of U+2-ACTX-Hv1a alone resulted in 9% mortality. And, the combination of 58.5 μL/L of MADEX® HP with 2 mg/mL of U+2-ACTX-Hv1a resulted in 38.5% mortality.

[1950] Therefore, this example demonstrates that a combination of MADEX® HP and U+2-ACTX-Hv1a results in an unexpected, synergistic effect, wherein the combination results in more than the expected additive effect.

### Example 16: Unexpected Effects

[1951] The foregoing examples (i.e., Examples 1-15) were shown to demonstrate unexpected effects that were greater than the additive effects of any one of the IAs or CRIPs alone. Indeed, evidencing the unexpected, greater than additive effects of Examples 1-15 are the results of the tests shown below, which did not show greater than additive effects. Here, combinations of U+2-ACTX-Hv1a and Novaluron, nanoparticles, and cryolite, did not result in greater than additive effects

[1952] Insect Growth Regulator (IGR): Novaluron

[1953] Insect growth regulators (IGRs) act by interfering with larval insects' ability to molt to the next instar. Generally, the mechanism of action for IGRs is interference and/or inhibition of chitin synthases, which may allow bioavailability of insecticidal peptides in the insect gut. Novaluron or (±)-1-[3-chloro-4-(1,1,2-trifluoro-2-trifluoro-methoxyethoxy)phenyl]-3-(2,6-difluorobenzoyl)urea (CAS No 116714-46-6), is an IGR. Here we tested combinations of Novaluron with U+2-ACTX-Hv1a to determine its insecticidal effects.

[1954] Novaluron was obtained in the form of Pedestal®, which consists of 10% Novaluron, and 90% other ingredients (OHP, Inc. P.O. Box 746 Bluffton, South Carolina, 29910 USA). Here, U+2-ACTX-Hv1a having an amino acid sequence of “GSQYCVPVDQPCSLNTQPCCDDATCTQERNENGHTVYYCRA” (SEQ ID NO: 61) was obtained from SPEAR®-T Liquid Concentrate (Lot No. 14143019 Vestaron®, 4717 Campus Drive, Kalamazoo, MI 49008 USA). Pedestal is a formulated insecticide which is an inhibitor of chitin biosynthesis which affects CHS1. Novaluron is part of the IRAC 15 group.

[1955] Here, treatments evaluating the following concentrations of Novaluron were tested (with and without U+2-ACTX-Hv1a):
[1956] (a) 80 μL/L of Novaluron (0.008% w/v);
[1957] (b) 8 μL/L of Novaluron (0.0008% w/v);
[1958] (c) 0.8 μL/L of Novaluron (0.00008% w/v); and
[1959] (d) 0 μL/L of Novaluron (0% w/v).

[1960] The bioassay arena was as follows: 128-well trays were arranged, wherein each well was filled with 200 μL of agar-based general lepidopteran diet infused with the above treatments. Here, 16 wells per treatment was filled. One neonate corn earworm (Helicoverpa zea) was placed in each well and their survival was evaluated over four days.

[1961] FIG. 20 depicts a graphs showing the mortality results after 3-days. As shown here, there was no evidence of a greater than additive effect when combining Novaluron with U+2-ACTX-Hv1a in a corn earworm (Helicoverpa zea) diet incorporation assay.

[1962] Nanoparticles

[1963] Nanoparticles induce tight junction relaxation and enable the oral delivery of insulin in mice. When integrins are bound by nanoparticles, they can stimulate signaling pathways that activates MLCK enzyme. Here, Nanoparticle solutions, with and without 5 ppt U+2-ACTX-Hv1a (0.5 mg/mL) (0.5% w/v) were evaluated. Here, nanoparticles were obtained in the form of NanoXact Silica Nanospheres (nanoCompsix, 4878 Ronson Ct Ste J, San Diego, CA 92111)

[1964] The nanoparticle concentrations were as follows:
[1965] (a) 50 nm silica aminated (2700 ppm);
[1966] (b) 50 silica (2575 ppm);
[1967] (c) 20 nm silica (1177 ppm); and
[1968] (d) 10 nm silica (12500 ppm).

[1969] Droplet bioassay arenas were performed in 128-well trays that contained agar, wax paper, 3 μL nanoparticle solution, and 1 neonate H. zea (corn earworm). Here 16 wells (larvae) were evaluated per treatment, and were evaluated every day, for 3 days for proportional mortality.

[1970] “Proportion mortality” or “proportional mortality” refers to the proportion of individual insects killed over the course of an experiment. Proportion mortality can be calculated according to Formula (IV), as follows:

$$Proportion mortality = \frac{Number of dead individuals}{Number of total individuals} \qquad Formula ( IV )$$

[1971] Mortality results after 3 days are shown in FIG. 21. As shown, there is no evidence of a greater than additive effect when combining nanoparticles with U+2-ACTX-Hv1a.

[1972] Stomach Poison

[1973] The stomach poison cryolite was evaluated in combination with U+2-ACTX-Hv1a._Cryolite (Na₃AlF₆, sodium hexafluoroaluminate) is IRAC group 8C: “miscellaneous non-specific (multi-site) inhibitors. Cryolite dissolves in insect gut and fluoride ions likely cause toxicity, however, it has low toxicity to non-targets, such as vertebrates (including mammals).

[1974] Cryolite treatment concentrations were evaluated with and without 10 ppt Spear (1 mg/mL or 1% w/v the total composition), and were as follows:
[1975] (a) 10000 ppm;
[1976] (b) 2000 ppm;
[1977] (c) 400 ppm; and
[1978] (d) 0 ppm.

[1979] Cryolite was obtained in the form of Prokil®, a commercially available form of cryolite consisting of 96% cryolite (sodium aluminofluoride) and 4% other ingredients (Gowan®, 370 South Main Street, Yuma, Arizona 85364 USA).

[1980] Bioassay arenas was as follows: 128-well trays were arranged, and each well was filled with 200 μL of agar-based general lepidopteran diet infused with the above treatments. Here, 16 wells per treatment were filled. One neonate corn earworm (Helicoverpa zea) was placed in each well and their survival was evaluated over four days.

[1981] As shown in FIG. 22, there is no evidence of a greater than additive effect when combining cryolite with U+2-ACTX-Hv1a.

1-106. (canceled)

107. A combination comprising a Cysteine Rich Insecticidal Peptide (CRIP) and an Insecticidal Agent (IA).

108. The combination of claim 107, wherein the IA is: a virus; a fungal toxin, a bacterial toxin; a lectin; an Azadirachta indica compound; a boron compound; or a combination thereof.

109. The combination of claim 108, wherein the virus is a granulovirus; the fungal toxin is a Beauveria toxin; and the bacterial toxin is a Bacillus thuringiensis (Bt) toxin protein or a Photorhabdus toxin.

110. The combination of claim 109, wherein the granulovirus is selected from: Adoxophyes orana granulovirus; Agrotis segetum granulovirus; Artogeia rapae granulovirus; Pieris brassicae granulovirus; Choristoneura fumiferana granulovirus; Choristoneura occidentalis granulovirus; Clostera anachoreta granulovirus; Clostera anastomosis granulovirus A; Clostera anastomosis granulovirus Henan; Clostera anastomosis granulovirus B; Cnaphalocrocis medinalis granulovirus; Cryptophlebia leucotreta granulovirus; Cydia pomonella granulovirus (CpGV); Diatraea saccharalis granulovirus; Epinotia aporema granulovirus; Erinnyis ello granulovirus; Harrisina brillians granulovirus; Helicoverpa armigera granulovirus; Lacanobia oleracea granulovirus; Mocis latipes granulovirus; Mythimna unipuncta granulovirus A; Pseudalatia unipuncta granulovirus; Mythimna unipuncta granulovirus B; Mythimna unipuncta granulovirus; Phthorimaea operculella granulovirus; Plodia interpunctella granulovirus; Plutella xylostella granulovirus; Spodoptera frugiperda granulovirus; Spodoptera litura granulovirus; Trichoplusia ni granulovirus; Trichoplusia ni granulovirus LBIV-12; Xestia c-nigrum granulovirus; unclassified Betabaculovirus; Achaea janata granulovirus; Adoxophyes honmai granulovirus; Agrotis exclamationis granulovirus; Amelia pallorana granulovirus; Andraca bipunctata granulovirus; Autographa gamma granulovirus; Caloptilia theivora granulovirus; Choristoneura murinana granulovirus; Choristoneura viridis betabaculovirus; Clostera anastomosis granulovirus; Cnephasia longana granulovirus; Estigmene acrea granulovirus; Euxoa ochrogaster granulovirus; Heliothis armigera granulovirus; Hoplodrina ambigua granulovirus; Hyphantria cunea granulovirus; Natada nararia granulovirus; Nephelodes emmedonia granulovirus; Pandemis limitata granulovirus; Peridorma morpontora granulovirus; Pieris rapae granulovirus; Plathypena scabra granulovirus; Pseudaletia betabaculovirus; Scotogramma trifolii granulovirus; Spodoptera androgea granulovirus; Spodoptera littoralis granulovirus; Tecia solanivora granulovirus; or a Mocis sp. granulovirus.

111. The combination of claim 109, wherein the Bt toxin protein is one or more fermentation solids, spores, or toxins isolated from the group consisting of: Bacillus thuringiensis var. kurstaki (Btk); Bacillus thuringiensis var. tenebrionis (Btt); Bacillus thuringiensis var. israelensis (Bti); Bacillus thuringiensis var. aizawai; Bacillus thuringiensis var. aizawai/pacificus; Bacillus thuringiensis var. alesti; Bacillus thuringiensis var. amagiensis; Bacillus thuringiensis var. andalousiensis; Bacillus thuringiensis var. argentinensis; Bacillus thuringiensis var. asturiensis; Bacillus thuringiensis var. azorensis; Bacillus thuringiensis var. balearica; Bacillus thuringiensis var. berliner; Bacillus thuringiensis var. Bolivia, Bacillus thuringiensis var. brasilensis; Bacillus thuringiensis var. cameroun; Bacillus thuringiensis var. canadensis; Bacillus thuringiensis var. chanpaisis; Bacillus thuringiensis var. chinensis; Bacillus thuringiensis var. colmeri; Bacillus thuringiensis var. coreanensis; Bacillus thuringiensis var. dakota; Bacillus thuringiensis var. darmstadiensis; Bacillus thuringiensis var. dendrolimus; Bacillus thuringiensis var. entomocidus; Bacillus thuringiensis var. entomocidus/subtoxicus; Bacillus thuringiensis var. finitimus; Bacillus thuringiensis var. fukuokaensis; Bacillus thuringiensis var. galechiae; Bacillus thuringiensis var. galleriae; Bacillus thuringiensis var. graciosensis; Bacillus thuringiensis var. guiyangiensis; Bacillus thuringiensis var. higo; Bacillus thuringiensis var. huazhongensis; Bacillus thuringiensis var. iberica; Bacillus thuringiensis var. Indiana; Bacillus thuringiensis var. israelensis/tochigiensis; Bacillus thuringiensis var. japonensis; Bacillus thuringiensis var. jegathesan; Bacillus thuringiensis var. jinghongiensis; Bacillus thuringiensis var. kenyae; Bacillus thuringiensis var. kim; Bacillus thuringiensis var. kumamtoensis; Bacillus thuringiensis var. kunthalanags3; Bacillus thuringiensis var. kunthalaRX24; Bacillus thuringiensis var. kunthalaRX27; Bacillus thuringiensis var. kunthalaRX28; Bacillus thuringiensis var. kyushuensis; Bacillus thuringiensis var. leesis; Bacillus thuringiensis var. londrina; Bacillus thuringiensis var. malayensis; Bacillus thuringiensis var. medellin; Bacillus thuringiensis var. mexicanensis; Bacillus thuringiensis var. mogi; Bacillus thuringiensis var. monterrey; Bacillus thuringiensis var. morrisoni; Bacillus thuringiensis var. muju; Bacillus thuringiensis var. navarrensis; Bacillus thuringiensis var. neoleonensis; Bacillus thuringiensis var. nigeriensis; Bacillus thuringiensis var. novosibirsk; Bacillus thuringiensis var. ostriniae; Bacillus thuringiensis var. oswaldocruzi; Bacillus thuringiensis var. pahangi; Bacillus thuringiensis var. pakistani; Bacillus thuringiensis var. palmanyolensis; Bacillus thuringiensis var. pingluonsis; Bacillus thuringiensis var. pirenaica; Bacillus thuringiensis var. poloniensis; Bacillus thuringiensis var. pondicheriensis; Bacillus thuringiensis var. pulsiensis; Bacillus thuringiensis var. rongseni; Bacillus thuringiensis var. roskildiensis; Bacillus thuringiensis var. san diego; Bacillus thuringiensis var. seoulensis; Bacillus thuringiensis var. shandongiensis; Bacillus thuringiensis var. silo; Bacillus thuringiensis var. sinensis; Bacillus thuringiensis var. sooncheon; Bacillus thuringiensis var. sotto; Bacillus thuringiensis var. sotto/dendrolimus; Bacillus thuringiensis var. subtoxicus; Bacillus thuringiensis var. sumiyoshiensis; Bacillus thuringiensis var. sylvestriensis; Bacillus thuringiensis var. thailandensis; Bacillus thuringiensis var. thompsoni; Bacillus thuringiensis var. thuringiensis; Bacillus thuringiensis var. tochigiensis; Bacillus thuringiensis var. toguchini; Bacillus thuringiensis var. tohokuensis; Bacillus thuringiensis var. tolworthi; Bacillus thuringiensis var. toumanoffi; Bacillus thuringiensis var. vazensis; Bacillus thuringiensis var. wratislaviensis; Bacillus thuringiensis var. wuhanensis; Bacillus thuringiensis var. xiaguangiensis; Bacillus thuringiensis var. yosoo; Bacillus thuringiensis var. yunnanensis; Bacillus thuringiensis var. zhaodongensis; or Bacillus thuringiensis var. konkukian toxin.

112. The combination of claim 109, wherein the Photorhabdus toxin is selected from: a Photorhabdus akhurstii toxin; a Photorhabdus asymbiotica toxin; a Photorhabdus asymbiotica subsp. asymbiotica toxin; a Photorhabdus asymbiotica subsp. asymbiotica ATCC 43949 toxin; a Photorhabdus australis toxin; a Photorhabdus australis DSM 17609 toxin; a Photorhabdus bodei toxin; a Photorhabdus caribbeanensis toxin; a Photorhabdus cinerea toxin; a Photorhabdus hainanensis toxin; a Photorhabdus heterorhabditis toxin; a Photorhabdus kayaii toxin; a Photorhabdus khanii toxin; a Photorhabdus khanii NC19 toxin; a Photorhabdus khanii subsp. guanajuatensis toxin; a Photorhabdus kleinii toxin; a Photorhabdus laumondii toxin; a Photorhabdus laumondii subsp. clarkei toxin; a Photorhabdus laumondii subsp. laumondii toxin; a Photorhabdus laumondii subsp. laumondii TTO1 toxin; a Photorhabdus luminescens toxin; a Photorhabdus luminescens BA1 toxin; a Photorhabdus luminescens NBAII H75HRPL105 toxin; a Photorhabdus luminescens NBAII HiPL101 toxin; a Photorhabdus luminescens subsp. luminescens toxin; a Photorhabdus luminescens subsp. luminescens ATCC 29999 toxin; a Photorhabdus luminescens subsp. mexicana toxin; a Photorhabdus luminescens subsp. sonorensis toxin; a Photorhabdus namnaonensis toxin; a Photorhabdus noenieputensis toxin; a Photorhabdus stackebrandtii toxin; a Photorhabdus tasmaniensis toxin; a Photorhabdus temperata toxin; a Photorhabdus temperata J3 toxin; a Photorhabdus temperata subsp. phorame toxin; a Photorhabdus temperata subsp. temperata toxin; a Photorhabdus temperata subsp. temperata M1021 toxin; a Photorhabdus temperata subsp. temperata Meg1 toxin; a Photorhabdus thracensis toxin; a unclassified Photorhabdus toxin; a Photorhabdus sp. toxin; a Photorhabdus sp. 3014 toxin; a Photorhabdus sp. 3240 toxin; a Photorhabdus sp. Az29 toxin; a Photorhabdus sp. BS21 toxin; a Photorhabdus sp. CbKj163 toxin; a Photorhabdus sp. CRCIA-P01 toxin; a Photorhabdus sp. ENY toxin; a Photorhabdus sp. FL2122 toxin; a Photorhabdus sp. FL480 toxin; a Photorhabdus sp. FsIw96 toxin; a Photorhabdus sp. GDd233 toxin; a Photorhabdus sp. H3086 toxin; a Photorhabdus sp. H3107 toxin; a Photorhabdus sp. H3240 toxin; a Photorhabdus sp. HB301 toxin; a Photorhabdus sp. HB78 toxin; a Photorhabdus sp. HB89 toxin; a Photorhabdus sp. HIT toxin; a Photorhabdus sp. HO1 toxin; a Photorhabdus sp. HUG-39 toxin; a Photorhabdus sp. IT toxin; a Photorhabdus sp. JUN toxin; a Photorhabdus sp. KcTs129 toxin; a Photorhabdus sp. KJ13.1 TH toxin; a Photorhabdus sp. KJ14.3 TH toxin; a Photorhabdus sp. KJ24.5 TH toxin; a Photorhabdus sp. KJ29.1 TH toxin; a Photorhabdus sp. KJ37.1 TH toxin; a Photorhabdus sp. KJ7.1 TH toxin; a Photorhabdus sp. KJ8.2 TH toxin; a Photorhabdus sp. KJ9.1 TH toxin; a Photorhabdus sp. KJ9.2 TH toxin; a Photorhabdus sp. KK1.3 TH toxin; a Photorhabdus sp. KK1.4 TH toxin; a Photorhabdus sp. KMD74 toxin; a Photorhabdus sp. KOH toxin; a Photorhabdus sp. MID10 toxin; a Photorhabdus sp. MOL toxin; a Photorhabdus sp. MSW 058 toxin; a Photorhabdus sp. MSW 079 toxin; a Photorhabdus sp. NK2.1 TH toxin; a Photorhabdus sp. NK2.5 TH toxin; a Photorhabdus sp. NnMt2h toxin; a Photorhabdus sp. NP1 toxin; a Photorhabdus sp. OH10 toxin; a Photorhabdus sp. OnIr40 toxin; a Photorhabdus sp. OnKn2 toxin; a Photorhabdus sp. PB10.1 TH toxin; a Photorhabdus sp. PB16.3 TH toxin; a Photorhabdus sp. PB17.1 TH toxin; a Photorhabdus sp. PB17.3 TH toxin; a Photorhabdus sp. PB2.5 TH toxin; a Photorhabdus sp. PB22.4 TH toxin; a Photorhabdus sp. PB22.5 TH toxin; a Photorhabdus sp. PB32.1 TH toxin; a Photorhabdus sp. PB33.1 TH toxin; a Photorhabdus sp. PB33.4 TH toxin; a Photorhabdus sp. PB37.4 TH toxin; a Photorhabdus sp. PB39.2 TH toxin; a Photorhabdus sp. PB4.5 TH toxin; a Photorhabdus sp. PB41.4 TH toxin; a Photorhabdus sp. PB45.5 TH toxin; a Photorhabdus sp. PB47.1 TH toxin; a Photorhabdus sp. PB47.3 TH toxin; a Photorhabdus sp. PB5.1 TH toxin; a Photorhabdus sp. PB5.4 TH toxin; a Photorhabdus sp. PB50.4 TH toxin; a Photorhabdus sp. PB51.4 TH toxin; a Photorhabdus sp. PB52.2 TH toxin; a Photorhabdus sp. PB54.4 TH toxin; a Photorhabdus sp. PB58.2 TH toxin; a Photorhabdus sp. PB58.4 TH toxin; a Photorhabdus sp. PB58.5 TH toxin; a Photorhabdus sp. PB59.2 TH toxin; a Photorhabdus sp. PB6.5 TH toxin; a Photorhabdus sp. PB67.2 TH toxin; a Photorhabdus sp. PB67.4 TH toxin; a Photorhabdus sp. PB68.1 TH toxin; a Photorhabdus sp. PB7.5 TH toxin; a Photorhabdus sp. PB76.1 TH toxin; a Photorhabdus sp. PB76.4 TH toxin; a Photorhabdus sp. PB76.5 TH toxin; a Photorhabdus sp. PB78.2 TH toxin; a Photorhabdus sp. PB80.3 TH toxin; a Photorhabdus sp. PB80.4 TH toxin; a Photorhabdus sp. Pjun toxin; a Photorhabdus sp. RW14-46 toxin; a Photorhabdus sp. S10-54 toxin; a Photorhabdus sp. S12-55 toxin; a Photorhabdus sp. S14-60 toxin; a Photorhabdus sp. S15-56 toxin; a Photorhabdus sp. S5P8-50 toxin; a Photorhabdus sp. S7-51 toxin; a Photorhabdus sp. S8-52 toxin; a Photorhabdus sp. S9-53 toxin; a Photorhabdus sp. SJ2 toxin; a Photorhabdus sp. SN259 toxin; a Photorhabdus sp. SP1.5 TH toxin; a Photorhabdus sp. SP16.4 TH toxin; a Photorhabdus sp. SP21.5 TH toxin; a Photorhabdus sp. SP3.4 TH toxin; a Photorhabdus sp. SP4.5 TH toxin; a Photorhabdus sp. SP7.3 TH toxin; a Photorhabdus sp. TyKb140 toxin; a Photorhabdus sp. UK76 toxin; a Photorhabdus sp. VMG toxin; a Photorhabdus sp. WA21C toxin; a Photorhabdus sp. WkSs43 toxin; a Photorhabdus sp. Wx13 toxin; a Photorhabdus sp. X₄ toxin; a Photorhabdus sp. YNb90 toxin; a Photorhabdus sp. ZM toxin; or one or more proteins from a Photorhabdus luminescens toxin complex (Tca).

113. The combination of claim 109, wherein the Beauveria toxin is selected from: a Beauveria alba toxin; a Beauveria amorpha toxin; a Beauveria arenaria toxin; a Beauveria asiatica toxin; a Beauveria australis toxin; a Beauveria bassiana toxin; a Cordyceps bassiana toxin; a Beauveria brongniartii toxin; a Beauveria brumptii toxin; a Beauveria caledonica toxin; a Beauveria chiromensis toxin; a Beauveria coccorum toxin; a Beauveria cretacea toxin; a Beauveria cylindrospora toxin; a Beauveria delacroixii toxin; a Beauveria densa toxin; a Beauveria dependens toxin; a Beauveria doryphorae toxin; a Beauveria effusa toxin; a Beauveria epigaea toxin; a Beauveria felina toxin; a Beauveria geodes toxin; a Beauveria globulifera toxin; a Beauveria heimii toxin; a Beauveria hoplocheli toxin; a Beauveria kipukae toxin; a Beauveria laxa toxin; a Beauveria malawiensis toxin; a Beauveria medogensis toxin; a Beauveria melolonthae toxin; a Beauveria nubicola toxin; a Beauveria oryzae toxin; a Beauveria paradoxa toxin; a Beauveria paranensis toxin; a Beauveria parasitica toxin; a Beauveria petelotii toxin; a Beauveria pseudobassiana toxin; a Beauveria rileyi toxin; a Beauveria rubra toxin; a Beauveria shiotae toxin; a Beauveria sobolifera toxin; a Beauveria spicata toxin; a Beauveria stephanoderis toxin; a Beauveria sulfurescens toxin; a Beauveria sungii toxin; a Beauveria tenella toxin; a Beauveria tundrensis toxin; a Beauveria velata toxin; a Beauveria varroae toxin; a Beauveria vermiconia toxin; a Beauveria vexans toxin; a Beauveria viannai toxin; or a Beauveria virella toxin.

114. The combination of claim 108, wherein the lectin is selected from: Galanthus nivalis agglutinin (GNA); Sambucus nigra lectin (SNA); Maackia amurensis-II (MAL-II); Erythrina cristagalli lectin (ECL); Ricinus communis agglutinin-I (RCA); peanut agglutinin (PNA); wheat germ agglutinin (WGA); Griffonia simplicifolia-II (GSL-II); Con A; Lens culinaris agglutinin (LCA); Mannose-binding lectin (MBL); BanLec; galectins; Phaseolus vulgaris Leucoagglutinin (PHA-L); Phaseolus vulgaris Erythroagglutinin (PHA-E); or Datura stramonium Lectin (DSL).

115. The combination of claim 108, wherein the Azadirachta indica compound is selected from: Azadiradione; Azadiradionolide; Deacetylgedunin; Deacetylazadirachtinol; Desfuranoazadiradione; Epoxyazadiradione; Gedunin; Mahmoodin; Neemfruitin A; Neemfruitin B; Nimbolide; Nimbin; Nimolicinol; an Ohchinin Acetate; Salannin; Salannol; an alpha-Nimolactone; beta-Nimolactone; 2′,3′-Dihydrosalannin; 3-Deacetylsalannin; 6-Deacetylnimbin; 7-Acetyl-16,17-dehydro-16-hydroxyneotrichilenone; 7-Benzoylnimbocinol; 7-Deacetyl-7-benzoylepoxyazadiradione; 7-Deacetyl-7-benzoylgedunin; 7-Deacetyl-17-epinimolicinol; 15-Hydroxyazadiradione; 17-Epi-17-Hydroxyazadiradione; 17-Epiazadiradione; 20,21,22,23-Tetrahydro-23-oxoazadirone; 22,23-Dihydronimocinol; or 28-Deoxonimbolide.

116. The combination of claim 108, wherein the boron compound is selected from: borax; boric acid; disodium octaborate; sodium borate; sodium metaborate; sodium tetraborate decahydrate; boron oxide; boron carbide; boron nitride; boron tribromide; boron trichloride; or boron trifluoride.

117. The combination of claim 107, wherein the IA is: a Cydia pomonella granulovirus (CpGV); a Bt toxin protein comprising one or more fermentation solids, spores, or toxins isolated from a Bacillus thuringiensis var. kurstaki (Btk), a Bacillus thuringiensis var. tenebrionis (Btt), or a Bacillus thuringiensis var. israelensis (Bti); a Photorhabdus luminescens toxin complex (Tca); a Beauveria bassiana toxin; a Galanthus nivalis agglutinin (GNA); an Azadirachta indica compound; or a boron compound.

118. The combination of claim 117, wherein the Cydia pomonella granulovirus (CpGV) is a Cydia pomonella granulovirus isolate V22 virus; the Bt toxin protein is one or more fermentation solids, spores, or toxins isolated from a Bacillus thuringiensis ssp. kurstaki (Btk) strain EVB-113-19; a Bacillus thuringiensis ssp. tenebrionis (Btt) train NB-176, a Bacillus thuringiensis ssp. israelensis (Bti) strain BMP 144, or a Bt toxin protein as set forth in any one of SEQ ID NOs: 412-587; wherein the Tca comprises a TcaA protein (SEQ ID NO: 616), a TcaB protein (SEQ ID NO: 617), a TcaC protein (SEQ ID NO: 618), and a TcaZ protein (SEQ ID NO: 619); wherein the Beauveria bassiana toxin is a beauvericin toxin having the chemical formula C₄₅H₅₇N₃O₉, a beauvericin A toxin having the chemical formula C₄₆H₅₉N₃O₉, a beauvericin B toxin having the chemical formula C₄₇H₆₁N₃O₉, or a beauvericin toxin isolated from a Beauveria bassiana strain ANT-03 spore; wherein the Galanthus nivalis agglutinin (GNA) has an amino acid sequence as set forth in SEQ ID NO: 35; wherein the Azadirachta indica compound is Azadirachtin; or wherein the boron compound is boric acid.

119. The combination of claim 107, wherein the CRIP is a U1-agatoxin-Ta1b peptide; a U1-agatoxin-Ta1b Variant Polypeptide (TVP); a sea anemone toxin; an Av3 Variant Polypeptide (AVP); a Phoneutria toxin; or an Atracotoxin (ACTX).

120. The combination of claim 119, wherein the CRIP has an amino acid sequence that is at least 90% identical to an amino acid sequence as set forth in any one of SEQ ID NOs: 1, 2-15, 44, 45-47, 49-53, 60-64, 65, 588, 594, 621-622, 624-628, 631-640, 642-651, or 653-654.

121. The combination of claim 119, wherein the CRIP is a U1-agatoxin-Ta1b peptide having an amino acid sequence as set forth in SEQ ID NO: 1; a U1-agatoxin-Ta1b Variant Polypeptide (TVP) having an amino acid as set forth in any one of SEQ ID NOs: 2-15, 49-53, 2-15, 49-53, 621-622, 624-628, 631-640, 642-651, or 653-654; an Av3-Variant Polypeptide (AVP) having an amino acid as set forth in SEQ ID NO: 47; a Γ-CNTX-Pn1a having an amino acid sequence as set forth in SEQ ID NO: 65; or an ACTX having an amino acid sequence as set forth in any one of SEQ ID NOs: 60-64, or 594.

122. The combination of claim 121, wherein the CRIP is a U1-agatoxin-Ta1b peptide having an amino acid sequence as set forth in SEQ ID NO: 1; a U1-agatoxin-Ta1b Variant Polypeptide (TVP) having an amino acid as set forth in SEQ ID NO: 2-; an Av3-Variant Polypeptide (AVP) having an amino acid as set forth in SEQ ID NO: 47; a Γ-CNTX-Pn1a having an amino acid sequence as set forth in SEQ ID NO: 65; or an ACTX having an amino acid sequence as set forth in SEQ ID NO: 61.

123. The combination of claim 121, wherein the IA comprises a granulovirus selected from the group consisting of: Adoxophyes orana granulovirus; Agrotis segetum granulovirus; Artogeia rapae granulovirus; Pieris brassicae granulovirus; Choristoneura fumiferana granulovirus; Choristoneura occidentalis granulovirus; Clostera anachoreta granulovirus; Clostera anastomosis granulovirus A; Clostera anastomosis granulovirus Henan; Clostera anastomosis granulovirus B; Cnaphalocrocis medinalis granulovirus; Cryptophlebia leucotreta granulovirus; Cydia pomonella granulovirus (CpGV); Diatraea saccharalis granulovirus; Epinotia aporema granulovirus; Erinnyis ello granulovirus; Harrisina brillians granulovirus; Helicoverpa armigera granulovirus; Lacanobia oleracea granulovirus; Mocis latipes granulovirus; Mythimna unipuncta granulovirus A; Pseudalatia unipuncta granulovirus; Mythimna unipuncta granulovirus B; Mythimna unipuncta granulovirus; Phthorimaea operculella granulovirus; Plodia interpunctella granulovirus; Plutella xylostella granulovirus; Spodoptera frugiperda granulovirus; Spodoptera litura granulovirus; Trichoplusia ni granulovirus; Trichoplusia ni granulovirus LBIV-12; Xestia c-nigrum granulovirus; unclassified Betabaculovirus; Achaea janata granulovirus; Adoxophyes honmai granulovirus; Agrotis exclamationis granulovirus; Amelia pallorana granulovirus; Andraca bipunctata granulovirus; Autographa gamma granulovirus; Caloptilia theivora granulovirus; Choristoneura murinana granulovirus; Choristoneura viridis betabaculovirus; Clostera anastomosis granulovirus; Cnephasia longana granulovirus; Estigmene acrea granulovirus; Euxoa ochrogaster granulovirus; Heliothis armigera granulovirus; Hoplodrina ambigua granulovirus; Hyphantria cunea granulovirus; Natada nararia granulovirus; Nephelodes emmedonia granulovirus; Pandemis limitata granulovirus; Peridorma morpontora granulovirus; Pieris rapae granulovirus; Plathypena scabra granulovirus; Pseudaletia betabaculovirus; Scotogramma trifolii granulovirus; Spodoptera androgea granulovirus; Spodoptera littoralis granulovirus; Tecia solanivora granulovirus; a Cydia pomonella granulovirus (CpGV) isolate V22 virus; and a Mocis sp. Granulovirus.

124. The combination of claim 122, wherein the IA comprises one or more fermentation solids, spores, or toxins isolated from a Bacillus thuringiensis ssp. kurstaki strain EVB-113-19; and the CRIP comprises a U1-agatoxin-Ta1b Variant Polypeptide (TVP) having an amino acid sequence as set forth in SEQ ID NO: 2.

125. The combination of claim 107, wherein the IA comprises one or more fermentation solids, spores, or toxins isolated from a Bacillus thuringiensis ssp. kurstaki strain EVB-113-19, and the CRIP comprises an Av3-Variant Polypeptide (AVP) having an amino acid sequence as set forth in SEQ ID NO: 47.

126. The combination of claim 107, wherein the IA comprises one or more fermentation solids, spores, or toxins isolated from a Bacillus thuringiensis ssp. kurstaki strain EVB-113-19, and wherein the CRIP comprises a Γ-CNTX-Pn1a toxin having an amino acid sequence according to the amino acid sequence set forth in SEQ ID NO: 65.

127. The combination of claim 107, wherein the IA comprises a Beauveria bassiana strain ANT-03 spore, and wherein the CRIP comprises a U+2-ACTX-Hv1a toxin having an amino acid sequence as set forth in SEQ ID NO: 61.

128. The combination of claim 107, wherein the IA comprises one or more fermentation solids, spores, or toxins isolated from a Bacillus thuringiensis ssp. tenebrionis strain NB-176, and wherein the CRIP comprises a U+2-ACTX-Hv1a toxin having an amino acid sequence according to the amino acid sequence set forth in SEQ ID NO: 61.

129. The combination of claim 107, wherein the IA comprises one or more fermentation solids, spores, or toxins isolated from a Bacillus thuringiensis ssp. kurstaki strain EVB-113-19, and wherein the CRIP comprises a U+2-ACTX-Hv1a toxin having an amino acid sequence as set forth in SEQ ID NO: 61.

130. The combination of claim 107, wherein the IA comprises one or more fermentation solids, spores, or toxins isolated from a Bacillus thuringiensis ssp. israelensis Strain BMP 144, and wherein the CRIP comprises a U+2-ACTX-Hv1a toxin having an amino acid sequence according to the amino acid sequence set forth in SEQ ID NO: 61.

131. The combination of claim 107, wherein the IA comprises a Photorhabdus luminescens toxin complex (Tca) comprising a TcaA (SEQ ID NO: 616), a TcaB (SEQ ID NO: 617), a TcaC (SEQ ID NO: 618), and a TcaZ (SEQ ID NO: 619); and wherein the CRIP comprises a U+2-ACTX-Hv1a toxin having an amino acid sequence as set forth in SEQ ID NO: 61.

132. The combination of claim 107, wherein the IA comprises a Galanthus nivalis agglutinin (GNA) having an amino acid sequence as set forth in SEQ ID NO: 35; and wherein the CRIP comprises U+2-ACTX-Hv1a toxin having an amino acid sequence as set forth in SEQ ID NO: 61.

133. The combination of claim 107, wherein the IA comprises an Azadirachtin having a chemical formula: C₃₅H₄₄O₁₆; and wherein the CRIP comprises a U+2-ACTX-Hv1a toxin having an amino acid sequence as set forth in SEQ ID NO: 61.

134. The combination of claim 107, wherein the IA comprises a boric acid compound having a chemical formula of H₃BO₃; and wherein the CRIP comprises a U+2-ACTX-Hv1a toxin having an amino acid sequence as set forth in SEQ ID NO: 61.

135. The combination of claim 107, wherein the IA comprises a Cydia pomonella granulovirus (CpGV) isolate V22 virus; and wherein the CRIP is a U+2-ACTX-Hv1a toxin having an amino acid sequence as set forth in SEQ ID NO: 61.

136. The combination of claim 107, wherein each of the IA, and the CRIP, in the combination is formulated in separate compositions, wherein each separate composition further comprises at least one excipient.

137. The combination of claim 136, wherein the separate compositions are formulated as powders, dusts, pellets, granules, sprays, emulsions, colloids, solutions, or combinations thereof.

138. The combination of claim 136, wherein the separate compositions are formulated using the same excipients or different excipients.

139. The method of claim 136, wherein the separate compositions are applied separately, sequentially, simultaneously, concurrently, or chronologically staggered.

140. The combination of claim 107, wherein the IA is in admixture with the CRIP, and formulated in a single composition, wherein the single composition further comprises at least one excipient.

141. The combination of claim 140, wherein the single composition is formulated as a powder, a dust, a pellet, a granule, a spray, an emulsion, a colloid, a solution, or combinations thereof.

142. The combination of claim 107, wherein if the combination comprises a protein or peptide Insecticidal Agent (IA), then the IA is integrally expressed in a plant, or plant seed; and wherein the Cysteine Rich Insecticidal Peptide (CRIP) is formulated as a composition comprising at least one excipient, and the CRIP is applied onto a surface of the plant or plant seed containing the IA.

143. The combination of claim 107, wherein the combination comprises the Cysteine Rich Insecticidal Peptide (CRIP) integrally expressed in a plant or plant seed; and wherein the Insecticidal Agent (IA) is formulated as a composition comprising at least one excipient and the IA is applied onto a surface of the plant or plant seed containing the CRIP.

144. The combination of claim 107, wherein if the Insecticidal Agent (IA) is a protein, then both the IA and Cysteine Rich Insecticidal Peptide (CRIP) are integrally expressed in a plant.

145. The combination of claim 107, wherein the ratio of IA to CRIP in the combination ranges from about 10,000:1 to 1:10,000.

146. The combination of claim 145, wherein the ratio of IA to CRIP in the combination is about 10,000:1, 5,000:1, 1,000:1, 500:1, 250:1, 200:1, 100:1, 99:1, 95:5, 90:10, 85:15, 80:20, 75:25, 70:30, 65:35, 60:40, 55:45, 1:1, 45:55, 40:60, 35:65, 30:70, 25:75, 20:80, 15:85, 10:90, 5:95, 1:99, 1:100, 1:200, 1:250, 1:500, 1:1,000, 1:5,000, or 1:10,000.

147. A method of combating, controlling, or inhibiting a pest, the method comprising
(1) providing: a pesticidally effective amount of a combination comprising a Cysteine Rich Insecticidal Peptide (CRIP) and an Insecticidal Agent (IA); wherein the IA is selected from a virus; a fungal toxin, a bacterial toxin; a lectin; an Azadirachta indica compound; a boron compound; or a combination thereof; and the CRIP is selected from a U1-agatoxin-Ta1b peptide; a U1-agatoxin-Ta1b Variant Polypeptide (TVP); a sea anemone toxin; an Av3 Variant Polypeptide (AVP); a Phoneutria toxin; or an Atracotoxin (ACTX); and
(2) applying the combination to: the pest, a locus of the pest, a food supply of the pest, a habitat of the pest, or a breeding ground of the pest; a plant, a seed, a plant part, a locus of a plant, or an environment of a plant that is susceptible to an attack by the pest; an animal, a locus of an animal, or an environment of an animal susceptible to an attack by the pest; or a combination thereof.

148. The method of claim 147, wherein the pest is selected from the group consisting of: Eumorpha achemon; Colias eurytheme; Caudra cautella; Amorbia humerosana; Pseudaletia unipuncta; Platyptilia carduidactyla; Datana major; Thyridopteryx ephemeraeformis; Hypercompe scribonia; Erionota thrax; Acleris gloverana; Phryganidia californica; Paleacrita merriccata; Grapholita packardi; Nymphula stagnates, Xylomyges curialis; Cydia pomonella; Acrobasis vaccinii; Evergestis rimosalis; Noctuid species; Agrotis ipsilon; Orgyia pseudotsugata; Erinnyis ello; Ennomos subsignaria; Lobesia botrana; Thymelicus lineola; Melissopus latiferreanus; Archips rosanus; Archips argyrospilia; Paralobesia viteana; Platynota stultana; Harrisina americans; Plathypena scabra; Dryocampa rubicunda; Batrachedra comosae; Lymantria dispar; Lambdina fiscellaria; Manduca quinquemaculata; Manduca sexta; Pieris rapae; Automeris io; Choristoneura pinus; Epiphyas postvittana; Diaphania hyalinata; Homadaula anisocentra; Choristoneura rosaceana; Syntomeida epilais; Playnota stultana; Sabulodes aegrotata; Papilio cresphontes; Argyrotaenia citrana; Grapholita molests, Anarsia lineatella; Neophasia menapia; Argyrotaenia velutinana; Schizura concinna; Sibine stimulea; Heterocampa guttivitta; Estigmene acres, Crambus sp.; Ennomos subsignaria; Alsophila pometaria; Choristoneura fumiferana; Lasiocampidae sp.; Thecla basilides; Ephestia elutella; Platynota idaeusalis; Anarsia lineatella; Peridroma saucia; Platynota flavedana; Anticarsia gemmatalis; Datana integerrima; Hyphantria cunea; Orgyia vetusta; Southern Diatraea crambidoides; Cylas formicarius; Anthonomus eugenii; Diaprepes abbreviatus; Otiorhynchus ovatus; Curculio caryae; Curculio occidentis; Lissorhoptrus oryzophilus; Hypera postica; Hypera zoilus; Euwallacea fornicatus; Euetheola humilis; Hypothenemus hampei; Listronotus maculicollis; Maladera castanea; Rhizotroqus majalis; Cotinis nitida; Popillia japonica; Phyllophaga sp.; Cyclocephala borealis; Anomala orientalis; Cyclocephala lurida; Sphenophorus parvulus; Sphenophorus apicalis; Sphenophorus cariosus; Sphenophorus inaequalis; Sphenophorus minimus; Aedes aegypti; Busseola fusca; Chilo suppressalis; Culex pipiens; Culex quinquefasciatus; Diabrotica virgifera; Diatraea saccharalis; Helicoverpa armigera; Helicoverpa zea; Heliothis virescens; Leptinotarsa decemlineata; Ostrinia furnacalis; Ostrinia nubilalis; Pectinophora gossypiella; Plodia interpunctella; Plutella xylostella; Pseudoplusia includens; Spodoptera exigua; Spodoptera frugiperda; Spodoptera littoralis; Trichoplusia ni; and Xanthogaleruca luteola.

The application's sequence listing, which the Patent Office published only in electronic form, follows.

SEQUENCE LISTING (689 sequences)

SEQ ID NO: 1 - protein, 51 aa, Eratigena agrestis
EPDEICRARMTNKEFTYKSNVCNNCGDQVAACEAECFRNDVYTACHEAQKG

SEQ ID NO: 2 - protein, 51 aa, Artificial sequence
  TVP-R9Q
EPDEICRAQMTNKEFTYKSNVCNNCGDQVAACEAECFRNDVYTACHEAQKG

SEQ ID NO: 3 - protein, 50 aa, Artificial sequence
  TVP-R9QdeltaG
EPDEICRAQMTNKEFTYKSNVCNNCGDQVAACEAECFRNDVYTACHEAQK

SEQ ID NO: 4 - protein, 51 aa, Artificial sequence
  TVP-K18A
EPDEICRARMTNKEFTYASNVCNNCGDQVAACEAECFRNDVYTACHEAQKG

SEQ ID NO: 5 - protein, 50 aa, Artificial sequence
  TVP-K18AdeltaG
EPDEICRARMTNKEFTYASNVCNNCGDQVAACEAECFRNDVYTACHEAQK

SEQ ID NO: 6 - protein, 51 aa, Artificial sequence
  TVP-R38A
EPDEICRARMTNKEFTYKSNVCNNCGDQVAACEAECFANDVYTACHEAQKG

SEQ ID NO: 7 - protein, 50 aa, Artificial sequence
  TVP-R38AdeltaG
EPDEICRARMTNKEFTYKSNVCNNCGDQVAACEAECFANDVYTACHEAQK

SEQ ID NO: 8 - protein, 51 aa, Artificial sequence
  TVP-A8N
EPDEICRNRMTNKEFTYKSNVCNNCGDQVAACEAECFRNDVYTACHEAQKG

SEQ ID NO: 9 - protein, 50 aa, Artificial sequence
  TVP-A8NdeltaG
EPDEICRNRMTNKEFTYKSNVCNNCGDQVAACEAECFRNDVYTACHEAQK

SEQ ID NO: 10 - protein, 51 aa, Artificial sequence
  TVP-A8S
EPDEICRSRMTNKEFTYKSNVCNNCGDQVAACEAECFRNDVYTACHEAQKG

SEQ ID NO: 11 - protein, 50 aa, Artificial sequence
  TVP-A8SdeltaG
EPDEICRSRMTNKEFTYKSNVCNNCGDQVAACEAECFRNDVYTACHEAQK

SEQ ID NO: 12 - protein, 51 aa, Artificial sequence
  TVP-R9N
EPDEICRANMTNKEFTYKSNVCNNCGDQVAACEAECFRNDVYTACHEAQKG

SEQ ID NO: 13 - protein, 50 aa, Artificial sequence
  TVP-R9NdeltaG
EPDEICRANMTNKEFTYKSNVCNNCGDQVAACEAECFRNDVYTACHEAQK

SEQ ID NO: 14 - protein, 51 aa, Artificial sequence
  TVP-T11P
EPDEICRARMPNKEFTYKSNVCNNCGDQVAACEAECFRNDVYTACHEAQKG

SEQ ID NO: 15 - protein, 50 aa, Artificial sequence
  TVP-T11PdeltaG
EPDEICRARMPNKEFTYKSNVCNNCGDQVAACEAECFRNDVYTACHEAQK

SEQ ID NO: 16 - DNA, 153 bp, Eratigena agrestis
gaaccagacgagatatgcagagcaaggatgaccaacaaagaatttacctataagtccaacgtatgcaataattgtggcgaccaggtggcagcctgcgaggcagagtgctttcgtaatgacgtttacacagcttgtcacgaggctcagaaaggt

SEQ ID NO: 17 - DNA, 153 bp, Artificial sequence
  TVP-R9Q
gaaccagacgagatatgcagagcacaaatgaccaacaaagaatttacctataagtccaacgtatgcaataattgtggcgaccaggtggcagcctgcgaggcagagtgctttcgtaatgacgtttacacagcttgtcacgaggctcagaaaggt

SEQ ID NO: 18 - DNA, 150 bp, Artificial sequence
  TVP-R9QdeltaG
gaaccagacgagatatgcagagcacaaatgaccaacaaagaatttacctataagtccaacgtatgcaataattgtggcgaccaggtggcagcctgcgaggcagagtgctttcgtaatgacgtttacacagcttgtcacgaggctcagaaa

SEQ ID NO: 19 - DNA, 153 bp, Artificial sequence
  TVP-K18A
gaaccagacgagatatgcagagcaaggatgaccaacaaagaatttacctatgcttccaacgtatgcaataattgtggcgaccaggtggcagcctgcgaggcagagtgctttcgtaatgacgtttacacagcttgtcacgaggctcagaaaggt

SEQ ID NO: 20 - DNA, 150 bp, Artificial sequence
  TVP-K18AdeltaG
gaaccagacgagatatgcagagcaaggatgaccaacaaagaatttacctatgcttccaacgtatgcaataattgtggcgaccaggtggcagcctgcgaggcagagtgctttcgtaatgacgtttacacagcttgtcacgaggctcagaaa

SEQ ID NO: 21 - DNA, 153 bp, Artificial sequence
  TVP-R38A
gaaccagacgagatatgcagagcaaggatgaccaacaaagaatttacctataagtccaacgtatgcaataattgtggcgaccaggtggcagcctgcgaggcagagtgctttgctaatgacgtttacacagcttgtcacgaggctcagaaaggt

SEQ ID NO: 22 - DNA, 150 bp, Artificial sequence
  TVP-R38AdeltaG
gaaccagacgagatatgcagagcaaggatgaccaacaaagaatttacctataagtccaacgtatgcaataattgtggcgaccaggtggcagcctgcgaggcagagtgctttgctaatgacgtttacacagcttgtcacgaggctcagaaa

SEQ ID NO: 23 - DNA, 153 bp, Artificial sequence
  TVP-A8N
gaaccagacgagatatgcagaaacaggatgaccaacaaagaatttacctataagtccaacgtatgcaataattgtggcgaccaggtggcagcctgcgaggcagagtgctttcgtaatgacgtttacacagcttgtcacgaggctcagaaaggt

SEQ ID NO: 24 - DNA, 150 bp, Artificial sequence
  TVP-A8NdeltaG
gaaccagacgagatatgcagaaacaggatgaccaacaaagaatttacctataagtccaacgtatgcaataattgtggcgaccaggtggcagcctgcgaggcagagtgctttcgtaatgacgtttacacagcttgtcacgaggctcagaaa

SEQ ID NO: 25 - DNA, 153 bp, Artificial sequence
  TVP-A8S
gaaccagacgagatatgcagatcaaggatgaccaacaaagaatttacctataagtccaacgtatgcaataattgtggcgaccaggtggcagcctgcgaggcagagtgctttcgtaatgacgtttacacagcttgtcacgaggctcagaaaggt

SEQ ID NO: 26 - DNA, 150 bp, Artificial sequence
  TVP-A8SdeltaG
gaaccagacgagatatgcagatcaaggatgaccaacaaagaatttacctataagtccaacgtatgcaataattgtggcgaccaggtggcagcctgcgaggcagagtgctttcgtaatgacgtttacacagcttgtcacgaggctcagaaa

SEQ ID NO: 27 - DNA, 153 bp, Artificial sequence
  TVP-R9N
gaaccagacgagatatgcagagcaaacatgaccaacaaagaatttacctataagtccaacgtatgcaataattgtggcgaccaggtggcagcctgcgaggcagagtgctttcgtaatgacgtttacacagcttgtcacgaggctcagaaaggt

SEQ ID NO: 28 - DNA, 150 bp, Artificial sequence
  TVP-R9NdeltaG
gaaccagacgagatatgcagagcaaacatgaccaacaaagaatttacctataagtccaacgtatgcaataattgtggcgaccaggtggcagcctgcgaggcagagtgctttcgtaatgacgtttacacagcttgtcacgaggctcagaaa

SEQ ID NO: 29 - DNA, 153 bp, Artificial sequence
  TVP-T11P
gaaccagacgagatatgcagagcaaggatgcctaacaaagaatttacctataagtccaacgtatgcaataattgtggcgaccaggtggcagcctgcgaggcagagtgctttcgtaatgacgtttacacagcttgtcacgaggctcagaaaggt

SEQ ID NO: 30 - DNA, 150 bp, Artificial sequence
  TVP-T11PdeltaG
gaaccagacgagatatgcagagcaaggatgcctaacaaagaatttacctataagtccaacgtatgcaataattgtggcgaccaggtggcagcctgcgaggcagagtgctttcgtaatgacgtttacacagcttgtcacgaggctcagaaa

SEQ ID NO: 31 - protein, 4 aa, Artificial sequence
  IGER
IGER

SEQ ID NO: 32 - protein, 5 aa, Artificial sequence
  EEKKN
EEKKN

SEQ ID NO: 33 - protein, 8 aa, Artificial sequence
  ETMFKHGL
ETMFKHGL

SEQ ID NO: 34 - protein, 238 aa, Aequorea victoria
ASKGEELFTGVVPILVELDGDVNGHKFSVSGEGEGDATYGKLTLKFICTTGKLPVPWPTLVTTFSYGVQCFSRYPDHMKRHDFFKSAMPEGYVQERTISFKDDGNYKTRAEVKFEGDTLVNRIELKGIDFKEDGNILGHKLEYNYNSHNVYITADKQKNGIKANFKIRHNIEDGSVQLADHYQQNTPIGDGPVLLPDNHYLSTQSALSKDPNEKRDHMVLLEFVTAAGITHGMDELYK

SEQ ID NO: 35 - protein, 157 aa, Galanthus nivalis
MAKASLLILATIFLGVITPSCLSENILYSGETLPTGGFLSSGSFVFIMQEDCNLVLYNVDKPIWATNTGGLSSDCSLSMQNDGNLVVFTPSNKPIWASNTDGQNGNYVCILQKDRNVVIYGTNRWATGTYTGAVGIPESPPSEKYPSAGKIKLVTAK

SEQ ID NO: 36 - protein, 224 aa, Juniperus ashei
MARVSELAFLLAATLAISLHMQEAGVVKFDIKNQCGYTVWAAGLPGGGKRLDQGQTWTVNLAAGTASARFWGRTGCTFDASGKGSCQTGDCGGQLSCTVSGAVPATLAEYTQSDQDYYDVSLVDGFNIPLAINPTNAQCTAPACKADINAVCPSELKVDGGCNSACNVFKTDQYCCRNAYVDNCPATNYSKIFKNQCPQAYSYAKDDTATFACASGTDYSIVFC

SEQ ID NO: 37 - protein, 24 aa, Hordeum vulgare
MANKHLSLSLFLVLLGLSASLASG

SEQ ID NO: 38 - protein, 27 aa, Nicotiana plumbaginifolia
EMGKMASLFASLLVVLVSLSLASESSA

SEQ ID NO: 39 - protein, 26 aa, Nicotiana plumbaginifolia
MGKMASLFATFLVVLVSLSLASESSA

SEQ ID NO: 40 - DNA, 78 bp, Nicotiana plumbaginifolia
atgggtaagatggcttctctgtttgcttctctgctggttgttctggtttctctgtctctggcttctgaatcttctgct

SEQ ID NO: 41 - DNA, 78 bp, Nicotiana plumbaginifolia
atgggtaagatggcttctctgtttgctacttttctggttgttctggtttctctgtctctggcttctgaatcttctgct

SEQ ID NO: 42 - protein, 224 aa, Juniperus ashei
KFDIKNQCGYTVWAAGLPGGGKRLDQGQTWTVNLAAGTASARFWGRTGCTFDASGKGSCQTGDCGGQLSCTVSGAVPATLAEYTQSDQDYYDVSLVDGFNIPLAINPTNAQCTAPACKADINAVCPSELKVDGGCNSACNVFKTDQYCCRNAYVDNCPATNYSKIFKNQCPQAYSYAKDDTATFACASGTDYSIVFCMARVSELAFLLAATLAISLHMQEAGVV

SEQ ID NO: 43 - protein, 105 aa, Galanthus nivalis
DNILYSGETLSTGEFLNYGSFVFIMQEDCNLVLYDVDKPIWATNTGGLSRSCFLSMQTDGNLVVYNPSNKPIWASNTGGQNGNYVCILQKDRNVVIYGTDRWATG

SEQ ID NO: 44 - protein, 27 aa, Anemonia viridis
RSCCPCYWGGCPWGQNCYPEGCSGPKV

SEQ ID NO: 45 - protein, 27 aa, Artificial sequence
  AVPa
KSCCPCYWGGCPWGQNCYPEGCSGPKV

SEQ ID NO: 46 - protein, 26 aa, Artificial sequence
  AVPa-C1
RSCCPCYWGGCPWGQNCYPEGCSGPK

SEQ ID NO: 47 - protein, 26 aa, Artificial sequence
  AVPb
KSCCPCYWGGCPWGQNCYPEGCSGPK

SEQ ID NO: 48 - protein, 68 aa, Eratigena agrestis
MKLQLMICLVLLPCFFCEPDEICRARMTNKEFTYKSNVCNNCGDQVAACEAECFRNDVYTACHEAQKG

SEQ ID NO: 49 - protein, 51 aa, Artificial sequence
  T43A
EPDEICRARMTNKEFTYKSNVCNNCGDQVAACEAECFRNDVYAACHEAQKG

SEQ ID NO: 50 - protein, 50 aa, Artificial sequence
  T43AdeltaG
EPDEICRARMTNKEFTYKSNVCNNCGDQVAACEAECFRNDVYAACHEAQK

SEQ ID NO: 51 - protein, 51 aa, Artificial sequence
  TVP-R9Q/T43A
EPDEICRAQMTNKEFTYKSNVCNNCGDQVAACEAECFRNDVYAACHEAQKG

SEQ ID NO: 52 - protein, 50 aa, Artificial sequence
  TVP-R9Q/T43A/deltaG
EPDEICRAQMTNKEFTYKSNVCNNCGDQVAACEAECFRNDVYAACHEAQK

SEQ ID NO: 53 - protein, 49 aa, Artificial sequence
  TVP-R9Q/T43A/deltaG50-51
EPDEICRAQMTNKEFTYKSNVCNNCGDQVAACEAECFRNDVYAACHEAQ

SEQ ID NO: 54 - DNA, 153 bp, Artificial sequence
  T43A
gaaccagacgagatatgcagagcaaggatgaccaacaaagaatttacctataagtccaacgtatgcaataattgtggcgaccaggtggcagcctgcgaggcagagtgctttcgtaatgacgtttacgctgcttgtcacgaggctcagaaaggt

SEQ ID NO: 55 - DNA, 150 bp, Artificial sequence
  T43AdeltaG
gaaccagacgagatatgcagagcaaggatgaccaacaaagaatttacctataagtccaacgtatgcaataattgtggcgaccaggtggcagcctgcgaggcagagtgctttcgtaatgacgtttacgctgcttgtcacgaggctcagaaa

SEQ ID NO: 56 - DNA, 153 bp, Artificial sequence
  TVP-R9Q/T43A
gaaccagacgagatatgcagagcacaaatgaccaacaaagaatttacctataagtccaacgtatgcaataattgtggcgaccaggtggcagcctgcgaggcagagtgctttcgtaatgacgtttacgctgcttgtcacgaggctcagaaaggt

SEQ ID NO: 57 - DNA, 150 bp, Artificial sequence
  TVP-R9Q/T43A/deltaG
gaaccagacgagatatgcagagcacaaatgaccaacaaagaatttacctataagtccaacgtatgcaataattgtggcgaccaggtggcagcctgcgaggcagagtgctttcgtaatgacgtttacgctgcttgtcacgaggctcagaaa

SEQ ID NO: 58 - DNA, 147 bp, Artificial sequence
  TVP-R9Q/T43A/deltaG50-51
gaaccagacgagatatgcagagcacaaatgaccaacaaagaatttacctataagtccaacgtatgcaataattgtggcgaccaggtggcagcctgcgaggcagagtgctttcgtaatgacgtttacgctgcttgtcacgaggctcag

SEQ ID NO: 59 - protein, 17 aa, Eratigena agrestis
MKLQLMICLVLLPCFFC

SEQ ID NO: 60 - protein, 39 aa, Hadronyche versuta
QYCVPVDQPCSLNTQPCCDDATCTQERNENGHTVYYCRA

SEQ ID NO: 61 - protein, 41 aa, Artificial sequence
  U+2-ACTX-Hv1a
GSQYCVPVDQPCSLNTQPCCDDATCTQERNENGHTVYYCRA

SEQ ID NO: 62 - protein, 37 aa, Atrax robustus
SPTCIPSGQPCPYNENCCSQSCTFKENENGNTVKRCD

SEQ ID NO: 63 - protein, 39 aa, Artificial sequence
  Omega+2-ACTX-Hv1a
GSSPTCIPSGQPCPYNENCCSQSCTFKENENGNTVKRCD

SEQ ID NO: 64 - protein, 39 aa, Artificial sequence
  Kappa+2 ACTX-Hv1a
GSAICTGADRPCAACCPCCPGTSCKAESNGVSYCRKDEP

SEQ ID NO: 65 - protein, 49 aa, Phoneutria nigriventer
GSCADINGACKSDCDCCGDSVTCDCYWSDSCKCRESNFKIGMAIRKKFC

SEQ ID NO: 66 - protein, 33 aa, Pandinus imperator
GDCLPHLKRCKADNDCCGKKCKRRGTNAEKRCR

SEQ ID NO: 67 - protein, 157 aa, Galanthus nivalis
MAKASLLILAAIFLGVITPSCLSDNILYSGETLSTGEFLNYGSFVFIMQEDCNLVLYDVDKPIWATNTGGLSRSCFLSMQTDGNLVVYNPSNKPIWASNTGGQNGNYVCILQKDRNVVIYGTDRWATGTHTGLVGIPASPPSEKYPTAGKIKLVTAK

SEQ ID NO: 68 - protein, 316 aa, Sambucus nigra
MRVIAAAMLYLYIVVLAICSVGIEGIEYPSVSFNLAGAKSATWDFLRMPTSRNGYDDGEPITGNIVGRDGLCVDVRNGYDTDGTPIQLWPCGTQRNQQWTFHTDDTIRSMGKCMTANGLNNGGNIMIFNCSTAVENAIKWEVTIDGSIINPSSGLVITAPSAASRTILLLQNNIYAASQGWTVSNNVQPIVASIVGFREMCLQANGENNGVWMEDCEATSLQQQWALFGDRTIRVNSNRGLCVTTNGYNSRDLIIILKCQGLPSQRWFFNSDGAIVNPKSKLVMDVKSSNVSLREIIIYPATGRPNQQWVTQVLPS

SEQ ID NO: 69 - protein, 287 aa, Maackia amurensis
MATSNSKPTQVLLATFLTFFFLLLNNVNSSDELSFTINNFVPNEADLLFQGEASVSSTGVLQLTRVENGQPQKYSVGRALYAAPVRIWDNTTGSVASFSTSFTFVVKAPNPDITSDGLAFYLAPPDSQIPSGSVSKYLGLFNNSNSDSSNQIVAVELDTYFAHSYDPWDPNYRHIGIDVNGIESIKTVQWDWINGGVAFATITYLAPNKTLIASLVYPSNQTTFSVAASVDLKEILPEWVRVGFSAATGYPTEVETHDVLSWSFTSTLEANCDAATENNVHIARYTA

SEQ ID NO: 70 - protein, 239 aa, Erythrina cristagalli
VETISFSFSEFEPGNDNLTLQGAALITQSGVLQLTKINQNGMPAWDSTGRTLYTKPVHMWDSTTGTVASFETRFSFSIEQPYTRPLPADGLVFFMGPTKSKPAQGYGYLGVFNNSKQDNSYQTLAVEFDTFSNPWDPPQVPHIGIDVNSIRSIKTQPFQLDNGQVANVVIKYDAPSKILHVVLVYPSSGAIYTIAEIVDVKQVLPDWVDVGLSGATGAQRDAAETHDVYSWSFQASLPE

SEQ ID NO: 71 - protein, 540 aa, Ricinus communis
IFPKQYPIINFTTADATVESYTNFIRAVRSHLTTGADVRHEIPVLPNRVGLPISQRFILVELSNHAELSVTLALDVTNAYVVGCRAGNSAYFFHPDNQEDAEAITHLFTDVQNSFTFAFGGNYDRLEQLGGLRENIELGTGPLEDAISALYYYSTCGTQIPTLARSFMVCIQMISEAARFQYIEGEMRTRIRYNRRSAPDPSVITLENSWGRLSTAIQESNQGAFASPIQLQRRNGSKFNVYDVSILIPIIALMVYRCAPPPSSQFSLLIRPVVPNFNADVCMDPEPIVRIVGRNGLCVDVTGEEFFDGNPIQLWPCKSNTDWNQLWTLRKDSTIRSNGKCLTISKSSPRQQVVIYNCSTATVGATRWQIWDNRTIINPRSGLVLAATSGNSGTKLTVQTNIYAVSQGWLPTNNTQPFVTTIVGLYGMCLQANSGKVWLEDCTSEKAEQQWALYADGSIRPQQNRDNCLTTDANIKGTVVKILSCGPASSGQRWMFKNDGTILNLYNGLVLDVRRSDPSLKQIIVHPFHGNLNQIWLPLF

SEQ ID NO: 72 - protein, 273 aa, Arachis hypogaea
MKPFCVFLTFFLLLAASSKKVDSAETVSFNFNSFSEGNPAINFQGDVTVLSNGNIQLTNLNKVNSVGRVLYAMPVRIWSSATGNVASFLTSFSFEMKDIKDYDPADGIIFFIAPEDTQIPAGSIGGGTLGVSDTKGAGHFVGVEFDTYSNSEYNDPPTDHVGIDVNSVDSVKTVPWNSVSGAVVKVTVIYDSSTKTLSVAVTNDNGDITTIAQVVDLKAKLPERVKFGFSASGSLGGRQIHLIRSWSFTSTLITTTRRSIDNNEKKIMNMASA

SEQ ID NO: 73 - protein, 212 aa, Triticum aestivum
MKMMSTRALALGAAAVLAFAAATAQAQRCGEQGSNMECPNNLCCSQYGYCGMGGDYCGKGCQNGACWTSKRCGSQAGGATCTNNQCCSQYGYCGFGAEYCGAGCQGGPCRADIKCGSQAGGKLCPNNLCCSQWGFCGLGSEFCGGGCQSGACSTDKPCGKDAGGRVCTNNYCCSKWGSCGIGPGYCGAGCQSGGCDGVFAEAITANSTLLQE

SEQ ID NO: 74 - protein, 290 aa, Canavalia ensiformis
MAISKKSSLFLPIFTFITMFLMVVNKVSSSTHETNALHFMFNQFSKDQKDLILQGDATTGTDGNLELTRVSSNGSPQGSSVGRALFYAPVHIWESSAVVASFEATFTFLIKSPDSHPADGIAFFISNIDSSIPSGSTGRLLGLFPDANVIRNSTTIDFNAAYNADTIVAVELDTYPNTDIGDPSYPHIGIDIKSVRSKKTAKWNMQNGKVGTAHIIYNSVDKRLSAVVSYPNADSATVSYDVDLDNVLPEWVRVGLSASTGLYKETNTILSWSFTSKLKSNEIPDIATVV

SEQ ID NO: 75 - protein, 144 aa, Ananas comosus
SGLVKLGLWGGNEGTLQDIDGHPTRLTKIVIRSAHAIDALQFDYVEDGKTFAAGQWGGNGGKSDTIEFQPGEYLIAIKGTTGALGAVTNLVRSLTFISNMRTYGPFGLEHGTPFSVPVASGRIVAFYGRFGSLVDAFGIYLMPY

SEQ ID NO: 76 - protein, 54 aa, Lathyrus hirsutus
VTSYTLNEVVPLKDVVPEWVRIGFSATTGAEFAAHEVLSWSFHSELGGTSASKQ

SEQ ID NO: 77 - protein, 281 aa, Canavalia bonariensis
MAISKKSSLYLPIFTFITMLLMVVNKVSSSTADANALHFTFNQFSKDQKDLILQGDATTGTDGNLELTRVSSNGSPQGNSVGRALFYAPVHIWESSAVVASFDATFKFLIKSPDSEPADGITFFIANIDSSIPSGSGGRLLGLFPDANIIKNSTTIDFNAAYNADTIVAVELDTYPNTDIGDPNYPHIGIDIKSIRSKKTTRWNIQNGKVGTAHINYNSVGKRLSAIVSYPNSDSATVSYDVDLDNVLPEWVRVGLSATTGLYKETNTILSWSFTSKLKSN

SEQ ID NO: 78 - protein, 237 aa, Canavalia grandiflora
ADTIVAVELDTYPNTDIGDPNYPHIGIDIKSIRSKKIAKWNMQDGKVATAHIIYNSVGKRLSAVVSYPNADSATVSYDVDLDNVLPEWVRVGLSATTGLYKETNTILSWSFTSKLKSNSTAETNALHFTFNQFTKDQKDLILQGDATTDSDGNLQLTRVSSDGTPQGNSVGRALFYAPVHIWESSAVVASFDATFTFLIKSPDSDPADGITFFISNMDSTIPSGSGGRLLGLFPDAN

SEQ ID NO: 79 - protein, 237 aa, Cymbosema roseum
ADTIVAVELDSYPNTDIGDPSYPHIGIDIKSIRSKSTARWNMQTGKVGTAHISYNSVAKRLTAVVSYSGSSSTTVSYDVDLNNVLPEWVRVGLSATTGLYKETNTILSWSFTSKLKTNSIADANALHFSFHQFTQNPKDLILQGDATTDSDGNLELTKVSSSGSPQGSSVGRALFYAPVHIWESSAVVASFDATFTFLIKSPDSEPADGITFFIANTDTSIPSGSSGRLLGLFPDAN

SEQ ID NO: 80 - protein, 564 aa, Viscum album
MNGHLASRRAWVWYFLMLGQVFGATVKAETKFSYERLRLRVTHQTTGEEYFRFITLLRDYVSSGSFSNEIPLLRQSTIPVSDAQRFVLVELTNEGGDSITAAIDVTNLYVVAYQAGDQSYFLRDAPRGAETHLFTGTTRSSLPFNGSYPDLERYAGHRDQIPLGIDQLIQSVTALRFPGGSTRTQARSILILIQMISEAARFNPILWRARQYINSGASFLPDVYMLELETSWGQQSTQVQQSTDGVFNNPIRLAIPPGNFVTLTNVRDVIASLAIMLFVCGERPSSSDVRYWPLVIRPVIADDVTCSASEPTVRIVGRNGMCVDVRDDDFHDGNQIQLWPSKSNNDPNQLWTIKRDGTIRSNGSCLTTYGYTAGVYVMIFDCNTAVREATLWEIWGNGTIINPRSNLVLAASSGIKGTTLTVQTLDYTLGQGWLAGNDTAPREVTIYGFRDLCMESNGGSVWVETCVISQQNQRWALYGDGSIRPKQNQDQCLTCGRDSVSTVINIVSCSAGSSGQRWVFTNEGAILNLKNGLAMDVAQANPKLRRIIIYPATGKPNQMWLPVP

SEQ ID NO: 81 - protein, 250 aa, Homo sapiens [sequence omitted]

SEQ ID NO: 82 - protein, 234 aa, Cratylia mollis
ADTIVAVELDTYPNTDIGDPSYQHIGINIKSIRSKATTRWDVQNGKVGTAHISYNSVAKRLSAVVSYPGGSSATVSYDVDLNNILPEWVRVGLSASTGLYKETNTILSWSFTSKSNSTADAQSLHFTFNQFSQSPKDLILQGDASTDSDGNLQLTRVSNGSPQSDSVGRALYYAPVHIWDKSAVVASFDATFTFLIKSPDREIADGIAFFIANTDSSIPHGSGGRLLGLFPDAN

SEQ ID NO: 83 - protein, 569 aa, Viscum album
MNAVMDSRGAWVSCFLILGLVFGATVKAETKFSYERLRLRVTHQTTGDEYFRFITLLRDYVSSGSFSNEIPLLRQSTIPVSDAQRFVLVELTNQGGDSITAAIDVTNLYVVAYQAGDQSYFLRDAPDGAERHLFTGTTRSSLPFTGSYTDLERYAGHRDQIPLGIEELIQSVSALRYPGGSTRAQARSIIILIQMISEAARFNPIFWRVRQDINSGESFLPDMYMLELETSWGQQSTQVQQSTDGVFNNPFRLAISTGNFVTLSNVRDVIASLAIMLFVCRDRPSSSEVRYWPLVIRPVLENSGAVDDVTCTASEPTVRIVGRDGLCVDVRDGKFHNGNPIQLSPCKSNTDPNQLWTIRRDGTIRSNGRCLTTYGYTAGVYVMIFDCNTAVREATLWQIWGNGTIINPRSNLVLGAASGSSGTTLTVQTQVYSLGQGWLAGNDTAPREVTIYGFRDLCMEANGASVWVETCGSSTENQNWALYGDGSIRPKQNQDQCLTCQGDSVATVINIVSCSAGSSGQRWVFTNEGTILNLNNGLVMDVAQSNPSLRRIIIYPATGNPNQMWLPVP

SEQ ID NO: 84 - protein, 239 aa, Cymbosema roseum
SGAVHFSFTKFSTSSSDLTLQGSALVSSKGSLKKNPSKKGKPVDHSVGRALYRSPIHIWDETTGKVASFDATFSFVSEAPAIPMLFPSSKGELNDEDDTRIGGQLGVVNDSYNVIRVTVAVENDGYRNRVDPSARPHISLPIKSVRSKKTAKWNMQTGKVGTAHISYNSVAKRLSAVVSYTGNSSSTTVSYDVLLNLAVLPSKVLVGKTATGLYKDHVETNTILSWSFTSKLKTNSIAD

SEQ ID NO: 85 - protein, 135 aa, Homo sapiens
MACGLVASNLNLKPGECLRVRGEVAPDAKSFVLNLGKDSNNLCLHFNPRFNAHGDANTIVCNSKDGGAWGTEQREAVFPFQPGSVAEVCITFDQANLTVKLPDGYEFKFPNRLNLEAINYMAADGDFKIKCVAFD

SEQ ID NO: 86 - protein, 168 aa, Patiria pectinifera
MAFFRALCFVLLVGFAAACQPDCSWKCPPKCPPMWTFYNGNCYRYFGTGKTYDEAESHCQEFTEVGLGHLASIASAEENNLLLTMWKSVRTTTTGGLWIGLNDQAEEGNFIWTDGSAVTFTDWATTQPDNYQNEDCAHMRHELDGDDRWNDIACSRAFAYVCKMSTTN

SEQ ID NO: 87 - protein, 233 aa, Vicia faba
TDEITSFSIPKFRPDQPNLIFQGGGYTTKEKLTLTKAVKNTVGRALYSLPIHIWDSETGNVADFTTTFIFVIDAPNGYNVADGFTFFIAPVDTKPQTGGGYLGVFNGKDYDKTAQTVAVEFDTFYNAAWDPSNGKRHIGIDVNTIKSISTKSWNLQNGEEAHVAISFNATTNVLSVTLLYPNLTGYTLSEVVPLKDVVPEWVRIGFSATTGAEYATHEVLSWTFLSELTGPSN

SEQ ID NO: 88 - protein, 88 aa, Androctonus australis
MKFLLLFLVVLPIMGVFGKKNGYAVDSSGKAPECLLSNYCNNECTKVHYADKGYCCLLSCYCFGLNDDKKVLEISDTRKSYCDTTIIN

SEQ ID NO: 89 - protein, 33 aa, Pandinus imperator; identical to SEQ ID NO: 66

SEQ ID NO: 90 - protein, 32 aa, Centruroides noxius
VACVYRTCDKDCTSRKYRSGKCINNACKCYPY

SEQ ID NO: 91 - protein, 37 aa, Parabuthus villosus
DEEPKESCSDEMCVIYCKGEEYSTGVCDGPQKCKCSD

SEQ ID NO: 92 - protein, 37 aa, Parabuthus villosus
DEEPKETCSDEMCVIYCKGEEYSTGVCDGPQKCKCSD

SEQ ID NO: 93 - protein, 36 aa, Parabuthus granulatus
DEEPKETCSDDMCVIYCKGEEFSTGACDGPQKCKCS

SEQ ID NO: 94 - protein, 40 aa, Tityus serrulatus
WCSTCLDLACGASRECYDPCFKAFGRAHGKCMNNKCRCYT

SEQ ID NO: 95 - protein, 40 aa, Tityus trivittatus; identical to SEQ ID NO: 94

SEQ ID NO: 96 - protein, 40 aa, Tityus costatus
WCSTCLDLECGASRECYDPCFKAFGRAHGKCMNNKCRCYT

SEQ ID NO: 97 - protein, 37 aa, Androctonus australis
QNETNKKCQGGSCASVCRRVIGVAAGKCINGRCVCYP

SEQ ID NO: 98 - protein, 37 aa, Androctonus mauretanicus mauretanicus
QIETNKKCQGGSCASVCRKVIGVAAGKCINGRCVCYP

SEQ ID NO: 99 - protein, 38 aa, Tityus discrepans
QIDTNVKCSGSSKCVKICIDRYNTRGAKCINGRCTCYP

SEQ ID NO: 100 - protein, 36 aa, Mesobuthus tamulus
DLIDVKCISSQECWIACKKVTGRFEGKCQNRQCRCY

SEQ ID NO: 101 - protein, 31 aa, Mesobuthus martensii
AACYSSDCRVKCVAMGFSSGKCINSKCKCYK

SEQ ID NO: 102 - protein, 37 aa, Mesobuthus tamulus
QFTDVDCSVSKECWSVCKDLFGVDRGKCMGKKCRCYQ

SEQ ID NO: 103 - protein, 37 aa, Centruroides limbatus
  misc_feature (37)..(37): Xaa can be any naturally occurring amino acid
VFIDVSCSVSKECWAPCKAAVGTDRGKCMGKKCRCYX

SEQ ID NO: 104 - protein, 36 aa, Leiurus quinquestriatus hebraeus
GLIDVRCYDSRQCWIACKKVTGSTQGKCQNKQCRCY

SEQ ID NO: 105 - protein, 36 aa, Centruroides limbatus
HFIDVKCTTSKECWPPCKAATGKAAGKCMNKKCKCQ

SEQ ID NO: 106 - protein, 37 aa, Parabuthus transvaalicus
EVDMRCKSSKECLVKCKQATGRPNGKCMNRKCKCYPR

SEQ ID NO: 107 - protein, 37 aa, Centruroides noxius
TFIDVDCTVSKECWAPCKAAFGVDRGKCMGKKCKCYV

SEQ ID NO: 108 - protein, 37 aa, Leiurus quinquestriatus hebraeus
QFTNVSCTTSKECWSVCEKLYNTSRGKCMNKKCRCYS

SEQ ID NO: 109 - protein, 39 aa, Centruroides noxius
TIINVKCTSPKQCSKPCKELYGSSAGAKCMNGKCKCYNN

SEQ ID NO: 110 - protein, 39 aa, Centruroides margaritatus
TIINVKCTSPKQCLPPCKAQFGQSAGAKCMNGKCKCYPH

SEQ ID NO: 111 - protein, 38 aa, Centruroides limpidus limpidus
ITINVKCTSPQQCLRPCKDRFGQHAGGKCINGKCKCYP

SEQ ID NO: 112 - protein, 38 aa, Centruroides noxius
TIINEKCFATSQCWTPCKKAIGSLQSKCMNGKCKCYNG

SEQ ID NO: 113 - protein, 39 aa, Centruroides limbatus
TVIDVKCTSPKQCLPPCKAQFGIRAGAKCMNGKCKCYPH

SEQ ID NO: 114 - protein, 34 aa, Centruroides limbatus
  misc_feature (23)..(23): Xaa can be any naturally occurring amino acid
TFINVKCTSPKQCLPACKEKFGXAAGKCMNGKCK

SEQ ID NO: 115 - protein, 36 aa, Centruroides limpidus limpidus
TVIDVKCTSPKQCLPPCKEIYGRHAGAKCMNGKCKC

SEQ ID NO: 116 - protein, 39 aa, Centruroides elegans
TVINVKCTSPKQCLKPCKDLYGPHAGAKCMNGKCKCYNN

SEQ ID NO: 117 - protein, 39 aa, Centruroides elegans
TIINVKCTSPKQCLKPCKDLYGPHAGAKCMNGKCKCYNN

SEQ ID NO: 118 - protein, 38 aa, Centruroides elegans
IFINVKCSLPQQCLRPCKDRFGQHAGGKCINGKCKCYP

SEQ ID NO: 119 - protein, 39 aa, Centruroides elegans
TIINVKCTSPKQCLLPCKEIYGIHAGAKCMNGKCKCYKI

SEQ ID NO: 120 - protein, 39 aa, Centruroides elegans
TIINVKCTSPKQCLPPCKEIYGRHAGAKCMNGKCHCSKI

SEQ ID NO: 121 - protein, 38 aa, Androctonus mauretanicus mauretanicus
GVEINVKCSGSPQCLKPCKDAGMRFGKCMNRKCHCTPK

SEQ ID NO: 122 - protein, 38 aa, Leiurus quinquestriatus hebraeus
GVPINVSCTGSPQCIKPCKDAGMRFGKCMNRKCHCTPK

SEQ ID NO: 123 - protein, 38 aa, Leiurus quinquestriatus hebraeus
GVPINVPCTGSPQCIKPCKDAGMRFGKCMNRKCHCTPK

SEQ ID NO: 124 - protein, 38 aa, Leiurus quinquestriatus hebraeus
GVPINVKCTGSPQCLKPCKDAGMRFGKCINGKCHCTPK

SEQ ID NO: 125 - protein, 38 aa, Orthochirus scrobiculosus
GVIINVKCKISRQCLEPCKKAGMRFGKCMNGKCHCTPK

SEQ ID NO: 126 - protein, 38 aa, Buthus sindicus
GVPINVKCRGSPQCIQPCRDAGMRFGKCMNGKCHCTPQ

SEQ ID NO: 127 - protein, 37 aa, Buthus occitanus tunetanus
VGIPVSCKHSGQCIKPCKDAGMRFGKCMNRKCDCTPK

SEQ ID NO: 128 - protein, 37 aa, Tityus serrulatus
VFINAKCRGSPECLPKCKEAIGKAAGKCMNGKCKCYP

SEQ ID NO: 129 - protein, 37 aa, Tityus discrepans
VFINVKCTGSKQCLPACKAAVGKAAGKCMNGKCKCYT

SEQ ID NO: 130 - protein, 37 aa, Tityus cambridgei
VFINVKCRGSKECLPACKAAVGKAAGKCMNGKCKCYP

SEQ ID NO: 131 - protein, 31 aa, Leiurus quinquestriatus hebraeus
AFCNLRMCQLSCRSLGLLGKCIGDKCECVKH

SEQ ID NO: 132 - protein, 31 aa, Androctonus mauretanicus mauretanicus
TVCNLRRCQLSCRSLGLLGKCIGVKCECVKH

SEQ ID NO: 133 - protein, 31 aa, Mesobuthus tamulus
AFCNLRRCELSCRSLGLLGKCIGEECKCVPY

SEQ ID NO: 134 - protein, 31 aa, Mesobuthus tamulus
AFCNLRRCELSCRSLGLLGKCIGEECKCVPH

SEQ ID NO: 135 - protein, 35 aa, Pandinus imperator
LVKCRGTSDCGRPCQQQTGCPNSKCINRMCKCYGC

SEQ ID NO: 136 - protein, 34 aa, Scorpio maurus palmatus
VSCTGSKDCYAPCRKQTGCPNAKCINKSCKCYGC

SEQ ID NO: 137 - protein, 34 aa, Heterometrus spinifer
ASCRTPKDCADPCRKETGCPYGKCMNRKCKCNRC

SEQ ID NO: 138 - protein, 35 aa, Anuroctonus phaiodactylus
QKECTGPQHCTNFCRKNKCTHGKCMNRKCKCFNCK

SEQ ID NO: 139 - protein, 34 aa, Heterometrus spinifer
IRCSGSRDCYSPCMKQTGCPNAKCINKSCKCYGC

SEQ ID NO: 140 - protein, 36 aa, Hadrurus gertschi
TGTSCISPKQCTEPCRAKGCKHGKCMNRKCHCMLCL

SEQ ID NO: 141 - protein, 35 aa, Pandinus imperator
TISCTNEKQCYPHCKKETGYPNAKCMNRKCKCFGR

SEQ ID NO: 142 - protein, 42 aa, Centruroides elegans
DRDSCVDKSRCAKYGYYQECTDCCKKYGHNGGTCMFFKCKCA

SEQ ID NO: 143 - protein, 42 aa, Centruroides gracilis
DRDSCVDKSRCAKYGHYQECTDCCKKYGHNGGTCMFFKCKCA

SEQ ID NO: 144 - protein, 42 aa, Centruroides sculpturatus
DRDSCVDKSRCAKYGYYQECQDCCKKAGHNGGTCMFFKCKCA

SEQ ID NO: 145 - protein, 42 aa, Centruroides limpidus limpidus
DRDSCVDKSRCSKYGYYQECQDCCKKAGHNGGTCMFFKCKCA

SEQ ID NO: 146 - protein, 42 aa, Centruroides exilicauda
DRDSCVDKSRCAKYGYYQECQDCCKKAGHSGGTCMFFKCKCA

SEQ ID NO: 147 - protein, 43 aa, Centruroides noxius
DRDSCVDKSKCGKYGYYQECQDCCKNAGHNGGTCVYYKCKCNP

SEQ ID NO: 148 - protein, 36 aa, Buthus eupeus
MCMPCFTTRPDMAQQCRACCKGRGKCFGPQCLCGYD

SEQ ID NO: 149 - protein, 35 aa, Buthus sindicus
RCKPCFTTDPQMSKKCADCCGGKGKGKCYGPQCLC

SEQ ID NO: 150 - protein, 36 aa, Buthus eupeus
MCMPCFTTDHQTARRCRDCCGGRGRKCFGQCLCGYD

SEQ ID NO: 151 - protein, 35 aa, Buthus eupeus
MCMPCFTTDHNMAKKCRDCCGGNGKCFGPQCLCNR

SEQ ID NO: 152 - protein, 35 aa, Buthus eupeus
MCMPCFTTDPNMAKKCRDCCGGNGKCFGPQCLCNR

SEQ ID NO: 153 - protein, 36 aa, Buthus occitanus tunetanus
  MISC_FEATURE (32)..(33): Xaa can be any naturally occurring amino acid
VRDAYIAQNYNCVYTCFKNDYCNDICTKNGAXXGYC

SEQ ID NO: 154 - protein, 38 aa, Leiurus quinquestriatus hebraeus
RCSPCFTTDQQMTKKCYDCCGGKGKGKCYGPQCICAPY

SEQ ID NO: 155 - protein, 33 aa, Buthus occitanus tunetanus
AEIKVRDGYIVYPNNCVYHCGLDPYCNDLCTGA

SEQ ID NO: 156 - protein, 33 aa, Scorpio maurus palmatus
GDCLPHLKLCKENKDCCSKKCKRRGTNIEKRCR

SEQ ID NO: 157 - protein, 36 aa, Buthus sindicus
CGPCFTKDPETEKKCATCCGGIGRCFGPQCLCNRGY

SEQ ID NO: 158 - protein, 36 aa, Leiurus quinquestriatus quinquestriatus
MCMPCFTTDHQMARKCDDCCGGKGRGKCYGPQCLCR

SEQ ID NO: 159 - protein, 35 aa, Androctonus mauretanicus mauretanicus
CGPCFTTDPYTESKCATCCGGRGKCVGPQCLCNRI

SEQ ID NO: 160 - protein, 35 aa, Buthus eupeus
MCMPCFTTDPNMANKCRDCCGGGKKCFGPQCLCNR

SEQ ID NO: 161 - protein, 35 aa, Hemiscorpius lepturus
IKCTLSKDCYSPCKKETGCPRAKCINRNCKCYGCS

SEQ ID NO: 162 - protein, 34 aa, Leiurus quinquestriatus hebraeus
CGPCFTTDHQMEQKCAECCGGIGKCYGPQCLCNR

SEQ ID NO: 163 - protein, 70 aa, Androctonus australis
KKNGYAVDSSGKAPECLLSNYCNNECTKVHYADKGYCCLLSCYCFGLNDDKKVLEISDTRKSYCDTTIIN

SEQ ID NO: 164 - protein, 72 aa, Anuroctonus phaiodactylus
KFIRHKDESFYECGQLIGYQQYCVNACQAHGSKEKGYCKGMAPFGLPGGCYCPKLPSNRVKMCFGALESKCA

SEQ ID NO: 165 - protein, 61 aa, Buthacus arenicola
DGYIRRRDGCKVSCLFGNEGCDKECKAYGGSYGYCWTWGLACWCEGLPDDKTWKSETNTCG

SEQ ID NO: 166 - protein, 65 aa, Bothus occitanus tunetanus
VRDAYIAQNYNCVYFCMKDDYCNDLCTKNGASSGYCQWAGKYGNACWCYALPDNVPIRIPGKCHS

SEQ ID NO: 167 - protein, 60 aa, Bothus occitanus tunetanus
DGYIKGYKGCKITCVINDDYCDTECKAEGGTYGYCWKWGLACWCEDLPDEKRWKSETNTC

SEQ ID NO: 168 - protein, 64 aa, Buthus martensii
VRDAYIAKPHNCVYECARNEYCNDLCTKNGAKSGYCQWVGKYGNGCWCIELPDNVPIRVPGKCH

SEQ ID NO: 169 - protein, 64 aa, Buthus martensii
VRDAYIAKPHNCVYSCARNEWCNDLCTKNGAKSGYCQWVGKYGNGCWCIELPDNVPIRVPGKCH

SEQ ID NO: 170 - protein, 64 aa, Buthus martensii
VRDAYIAKPENCVYHCAGNEGCNKLCTDNGAESGYCQWGGRYGNACWCIKLPDDVPIRVPGKCH

SEQ ID NO: 171 - protein, 66 aa, Buthus martensii
VRDGYIALPHNCAYGCLNNEYCNNLCTKDGAKIGYCNIVGKYGNACWCIQLPDNVPIRVPGRCHPA

SEQ ID NO: 172 - protein, 72 aa, Buthus martensii
KKNGYAVDSSGKVAECLFNNYCNNECTKVYYADKGYCCLLKCYCFGLADDKPVLDIWDSTKNYCDVQIIDLS

SEQ ID NO: 173 - protein, 66 aa, buthus occitanus mardochei
GRDGYIAQPENCVYHCFPGSSGCDTLCKEKGATSGHCGFLPGSGVACWCDNLPNKVPIVVGGEKCH

SEQ ID NO: 174 - protein, 65 aa, buthus occitanus mardochei
GRDAYIAQPENCVYECAKNSYCNDLCTKNGAKSGYCQWLGKYGNACWCEDLPDNVPIRIPGKCHF

SEQ ID NO: 175 - protein, 64 aa, Hottentotta judaica
GRDAYALDNLNCAYTCGSKSYCNTECTKNGAVSGYCQWLGKYGNACWCINLPDKVPIRIPGACR

SEQ ID NO: 176 - protein, 76 aa, Hottentotta judaicus
KKNGYPLDRNGKTTECSGVNAIAPHYCNSECTKVYYAESGYCCWGACYCFGLEDDKPIGPMKDITKKYCDVQIIPS

SEQ ID NO: 177 - protein, 61 aa, Hottentotta judaicus
DGYIRKKDGCKVSCIIGNEGCRKECVAHGGSFGYCWTWGLACWCENLPDAVTWKSSTNTCG

SEQ ID NO: 178 - protein, 64 aa, Leiurus quinquestriatus hebraeus
VRDAYIAKNYNCVYECFRDAYCNELCTKNGASSGYCQWAGKYGNACWCYALPDNVPIRVPGKCR

SEQ ID NO: 179 - protein, 63 aa, Leiurus quinquestriatus hebraeus
DNGYLLNKATGCKVWCVINNASCNSECKLRRGNYGYCYFWKLACYCEGAPKSELWAYATNKCN

SEQ ID NO: 180 - protein, 61 aa, Leiurus quinquestriatus hebraeus
DGYIKRRDGCKVACLIGNEGCDKECKAYGGSYGYCWTWGLACWCEGLPDDKTWKSETNTCG

SEQ ID NO: 181 - protein, 60 aa, Leiurus quinquestriatus hebraeus
DGYIRGDGCKVSCVINHVFCDNECKAAGGSYGYCWAWGLACWCEGLPAEREWKYETNTCG

SEQ ID NO: 182 - protein, 70 aa, Leiurus quinquestriatus hebraeus
KKNGFAVDSNGKAPECFFDHYCNSECTKVYYAEKGYCCLLSCYCFGLNDDKKVLEISDTTKKYCDFTIIN

SEQ ID NO: 183 - protein, 67 aa, Leiurus quinquestriatus hebraeus
VRDGYIAQPENCVYHCFPGSSGCDTLCKEKGGTSGHCGFKVGHGLACWCNALPDNVGIIVEGEKCHS

SEQ ID NO: 184 - protein, 64 aa, Leiurus quinquestriatus hebraeus
VRDGYIAQPENCVYHCIPDCDTLCKDNGGTGGHCGFKLGHGIACWCNALPDNVGIIVDGVKCHK

SEQ ID NO: 185 - protein, 66 aa, Leiurus quinquestriatus hebraeus
VRDGYIAKPENCAHHCFPGSSGCDTLCKENGGTGGHCGFKVGHGTACWCNALPDKVGIIVDGVKCH

SEQ ID NO: 186 - protein, 70 aa, Leiurus quinquestriatus quinquestriatus
KKNGYAVDSSGKAPECLLSNYCYNECTKVHYADKGYCCLLSCYCVGLSDDKKVLEISDARKKYCDFVTIN

SEQ ID NO: 187 - protein, 61 aa, Leiurus quinquestriatus quinquestriatus
DGYIRKRDGCKLSCLFGNEGCNKECKSYGGSYGYCWTWGLACWCEGLPDEKTWKSETNTCG

SEQ ID NO: 188 - protein, 64 aa, Leiurus quinquestriatus quinquestriatus
VRDAYIAKNYNCVYECFRDSYCNDLCTKNGASSGYCQWAGKYGNACWCYALPDNVPIRVPGKCH

SEQ ID NO: 189 - protein, 65 aa, Odonthobuthus doriae
GVRDAYIADDKNCVYTCASNGYCNTECTKNGAESGYCQWIGRYGNACWCIKLPDEVPIRIPGKCR

SEQ ID NO: 190 - protein, 61 aa, Tityus serrulatus
KEGYLMDHEGCKLSCFIRPSGYCGRECGIKKGSSGYCAWPACYCYGLPNWVKVWDRATNKC

SEQ ID NO: 191 - protein, 64 aa, Tityus zulianus
KDGYLVGNDGCKYSCFTRPGTYCANECSRVKGKDGYCYAWMACYCYSMPNWVKTWDRATNRCGR

SEQ ID NO: 192 - protein, 32 aa, Phoneutria nigriventer
VFCRSNGQQCTSDGQCCYGKCMTAFMGKICMR

SEQ ID NO: 193 - protein, 31 aa, Phoneutria nigriventer
VFCRFNGQQCTSDGQCCYGKCRTAFMGKICM

SEQ ID NO: 194 - protein, 33 aa, Phoneutria nigriventer
VFCRFNGQQCTSDGQCCYGKCRTAFLRMICMGG

SEQ ID NO: 195 - protein, 35 aa, Allagelena opulenta
GGCLPHNRFCNALSGPRCCSGLKCKELSIWDSRCL

SEQ ID NO: 196 - protein, 68 aa, Cupiennius salei
KDDKNCIPKHHECTNDKKNCCKKGLTKMKCKCFTVADAKGATSERCACDSSLLQKFGFTGLHIIKGLF

SEQ ID NO: 197 - protein, 80 aa, Calisoga sp.
MKYFVVFCVLIIAVAAFTSAAEDGEVFEENPLEFPKTIQKRCISARYPCSNSKDCCSGNCGTFWTCYIRKDPCSKECLAP

SEQ ID NO: 198 - protein, 39 aa, Calisoga sp.
CISARYPCSNSKDCCSGNCGTFWTCFIRKDPCSKECLAP

SEQ ID NO: 199 - protein, 39 aa, Calisoga sp.
CISARYPCSNSKDCCSGSCGIFWTCYLRKDPCSKECLAP

SEQ ID NO: 200 - protein, 82 aa, Plectreurys tristis
MKHLIFSSALVCALVVCTFAEEQVNVPFLPDERAVKCIGWQETCNGNLPCCNECVMCECNIMGQNCRCNHPKATNECESRRR

SEQ ID NO: 201 - protein, 61 aa, Plectreurys tristis
EEQVNVPFLPDERAVKCIGWQETCNGQLPCCDGCVMCECNIMGQNCRCNHPKMTSECGSRR

SEQ ID NO: 202 - protein, 79 aa, Plectreurys tristis
HLILASALICALVVCTFAEEQVNVPFLPDEREVKCIGWQEYCRGNLPCCDDCVMCECNIMGQNCRCNHPRITSECGSRR

SEQ ID NO: 203 - protein, 45 aa, Plectreurys tristis
AVKCIGWQETCNGNLPCCNECVMCECNIMGQNCRCNHPKATNECE

SEQ ID NO: 204 - protein, 46 aa, Plectreurys tristis
AVKCIGWQETCNGKLPCCDGCVMCECNIMGQNCRCNHPKATSECES

SEQ ID NO: 205 - protein, 31 aa, Coremiocnemis valida
ACSRAGENCYKSGRCCDGLYCKAYVVTCYKP

SEQ ID NO: 206 - protein, 85 aa, Haplopelma huwenum
MKVTLIAILTCAAVLVLHTTAAEELEAESQLMEVGMPDTELAAVDEERLFECSFSCEIEKEGDKPCKKKKCKGGWKCKFNMCVKV

SEQ ID NO: 207 - protein, 84 aa, Haplopelma huwenum
MKVTLIAILTCAAVLVLHTTAAEELEESQLMEVGMPDTELAAVDEERLFECSFSCEIEKEGDKPCKKKKCKGGWKCKFNMCVKV

SEQ ID NO: 208 - protein, 85 aa, Haplopelma huwenum
MKVTLIAILTCAAVLVLHTTAAEELEAESQLMEVGMPDTESAAVDEERLFECSFSCEIEKEGDKPCKKKKCKGGWKCKFNMCVKV

SEQ ID NO: 209 - protein, 37 aa, Haplopelma huwenum
LFECSFSCEQEKEGDKPCKKKKCKGGWKCKFNMCVKV

SEQ ID NO: 210 - protein, 85 aa, Haplopelma huwenum
MKVTLIAILTCAAVLVLHTTAAEELEAESQLMEVGMPDTELAAVDEERPFECSFSCEIEKEGDKPCKKKKCKGGWKCKFNMCVKV

SEQ ID NO: 211 - protein, 84 aa, Haplopelma huwenum
MKVTLIAILTCAAVLVLHTTAAEELEESQLMEVGMPDTELAAVDEERPFECSFSCEIEKEGDKPCKKKKCKGGWKCKFNMCVKV

SEQ ID NO: 212 - protein, 85 aa, Haplopelma huwenum
MKVTLIAILTCAAVLVLHTTAAEELEAESQLMEVGMPDTELAAVDEERLFECSFSCEIEKEGDKPCKKKKCKGGWKCKFNMCVKF

SEQ ID NO: 213 - protein, 85 aa, Haplopelma huwenum
MKVTLIAILTCAAVLVLHTTAAEELEAESQLMEVGMPDTELAAVDEERLFECSFSCEIEKEGDKLCKKKKCKGGWKCKFNMCVKV

SEQ ID NO: 214 - protein, 83 aa, Haplopelma huwenum
MKVTLIAILTCAAVLVLHTTAAEELEESQLMEVGMPDTELAAVDEERLFECSISCEIEKKGESCKPKKCKGGWKCKFNMCVKV

SEQ ID NO: 215 - protein, 84 aa, Haplopelma huwenum
MKVTLIAFLTCAAVLVLHTTAAEELEAESQLMEVGMPDTELAAVDEERLFECSISCEIEKKGESCKPKKCKGGWKCKFNMCVKV

SEQ ID NO: 216 - protein, 84 aa, Haplopelma huwenum
MKVTLIAILTCAAVLVLHTTAAEELEAESQLMEVGMPDTELAAVDEERLFECSISCEIEKKGESCKPKKCKGGWKCKFNMCVKV

SEQ ID NO: 217 - protein, 83 aa, Haplopelma huwenum; identical to SEQ ID NO: 214

SEQ ID NO: 218 - protein, 84 aa, Haplopelma huwenum
MKVTLIAILTCAAVLVLHTTAAEELEAESQLMEVGMPDTELAAVDEERLFECSISCEIEKKGESCKPKECKGGWKCKFNMCVKV

SEQ ID NO: 219 - protein, 70 aa, Agelena orientalis
MRAIISLFLISAMVFSMIQAVPEEEGLQLSEDERGGCLPHNRFCNALSGPRCCSGLKCKELSIWDSRCLG

SEQ ID NO: 220 - protein, 35 aa, Agelena opulenta; identical to SEQ ID NO: 195

SEQ ID NO: 221 - protein, 63 aa, Cupiennius salei
SDCTLRNHDCTDDRHSCCRSKMFKDVCTCFYPSQAKKELCTCQQPKHLKYIEKGLQKAKDYAT

SEQ ID NO: 222 - protein, 88 aa, Phoneutria nigriventer
MKVAILILSILVLAVASETIEEYRDDFAVEELERATCAGQDKPCKETCDCCGERGECVCALSYEGKYRCICRQGNFLIAWHKLASCKK

SEQ ID NO: 223 - protein, 37 aa, Apomastus schlingeri
CNSKGTPCTNADECCGGKCAYNVWNCIGGGCSKTCGY

SEQ ID NO: 224 - protein, 46 aa, Segestria florentina
KECMTDGTVCYIHNHNDCCGSCLCSNGPIARPWEMMVGNCMCGPKA

SEQ ID NO: 225 - protein, 46 aa, Segestria florentina
KECMADETVCYIHNHNNCCGSCLCLNGPYARPWEMLVGNCKCGPKE

SEQ ID NO: 226 - protein, 46 aa, Segestria florentina
KECMVDGTVCYIHNHNDCCGSCLCLNGPIARPWEMMVGNCKCGPKA

SEQ ID NO: 227 - protein, 46 aa, Segestria florentina
KECMVDGTVCYIHNHNDCCGSCLCLNGPIARPWKMMVGNCKCGPKA

SEQ ID NO: 228 - protein, 46 aa, Segestria florentina
KECMVDGTVCYIHNHNDCCGSCLCPNGPLARPWEMLVGNCKCGPKA

SEQ ID NO: 229 - protein, 46 aa, Segestria florentina
KECMTDETVCYIHNHNDCCGSCLCLNGPIARPWEMMVGNCKCGPKA

SEQ ID NO: 230 - protein, 46 aa, Segestria florentina
KECMADGTVCYIHNHNDCCGSCLCPNGPLARPWEVLVGNCKCGPKA

SEQ ID NO: 231 - protein, 46 aa, Segestria florentina
KECMADGTVCYIHNHNDCCGSCLCPNGPLARPWEMLVGNCKCGPKA

SEQ ID NO: 232 - protein, 87 aa, Haplopelma huwenum
MVNMKASMFLTFAGLVLLFVVCYASESEEKEFPKEMLSSIFAVDNDFKQEERDCAGYMRECKEKLCCSGYVCSSRWKWCVLPAPWRR

SEQ ID NO: 233 - protein, 32 aa, Apomastus schlingeri
WLGCARVKEACGPWEWPCCSGLKCDGSECHPQ

SEQ ID NO: 234 - protein, 49 aa, Plectreurys tristis
GCKGFLVKCDSNSECCKTAIVKGKKKQLSCLCGAWGAGCSCSFRCGNRC

SEQ ID NO: 235 - protein, 32 aa, Phoneutria nigriventer
SFCIPFKPCKSDENCCKKFKCKTTGIVKLCRW

SEQ ID NO: 236 - protein, 54 aa, Phoneutria keyserlingi
ATCAGQDKPCKETCDCCGERGECVCGLSYEGKYRCICRQGTFLIAWYKLASCKK

SEQ ID NO: 237 - protein, 79 aa, Macrothele gigas
MKAPATTLILVMSLISVLWATPDLEEGDLLAELGDLIATDDEYPMKPEERGCKLTFWKCKNKKECCGWNACALGICMPR

SEQ ID NO: 238 - protein, 29 aa, Macrothele raveni
GCKLTFWKCKNKKECCGWNACALGICMPR

SEQ ID NO: 239 - protein, 81 aa, Phoneutria nigriventer
MKVAIVFLSLLVLAFASESIEENREEFPVEESARCADINGACKSDCDCCGDSVTCDCYWSDSCKCRESNFKIGMAIRKKFC

SEQ ID NO: 240 - protein, 42 aa, Missulena bradleyi
CAKKREWCAKTEDCCCPMKCIYAWYNEQSSCQTTFSGMFKKC

SEQ ID NO: 241 - protein, 37 aa, Pireneitega luctuosa
GCLGEGEKCADWSGPSCCDGFYCSCRSMPYCRCRNNS

SEQ ID NO: 242 - protein, 37 aa, Pireneitega luctuosa
ACVGDGQRCASWSGPYCCDGYYCSCRSMPYCRCRNNS

SEQ ID NO: 243 - protein, 36 aa, Pireneitega luctuosa
ADCLNEGDWCADWSGPSCCGEMWCSCPGFGKCRCKK

SEQ ID NO: 244 - protein, 37 aa, Pireneitega luctuosa
ACATKNQRCASWAGPYCCDGFYCSCRSYPGCMCRPNS

SEQ ID NO: 245 - protein, 47 aa, Ancylometes sp.
ATCAGQDKPCKVNCDCCGERGECVCGGPCICRQGNVFIAWSKLMTCK

SEQ ID NO: 246 - protein, 48 aa, Phoneutria nigriventer
CGDINAACKEDCDCCGYTTACDCYWSKSCKCREAAIVIYTAPKKKLTC

SEQ ID NO: 247 - protein, 82 aa, Phoneutria nigriventer
MKVAIVFLSLLVLAFASESIEENREEFPVEESARCGDINAACKEDCDCCGYTTACDCYWSKSCKCREAAIVIYTAPKKKLTC

SEQ ID NO: 248 - protein, 48 aa, Phoneutria nigriventer
CGDINAACKEDCDCCGYTTACDCYWSSSCKCREAAIVIYTAPKKKLTC

SEQ ID NO: 249 - protein, 82 aa, Phoneutria nigriventer
MKVAILFLSILVLAVASESIEESRDDFAVEELGRATCAGQDQPCKETCDCCGERGECVCGGPCICRQGYFWIAWYKLANCKK

SEQ ID NO: 250 - protein, 49 aa, Phoneutria nigriventer
ATCAGQDQTCKVTCDCCGERGECVCGGPCICRQGNFLIAAYKLASCKCK

SEQ ID NO: 251 - protein, 82 aa, Phoneutria nigriventer
MKVAILFLSILVLAVASESIEESRDDFAVEELGRATCAGQDQTCKVTCDCCGERGECVCGGPCICRQGNFLIAWYKLASCKK

SEQ ID NO: 252 - protein, 47 aa, Phoneutria reidyi
GTCAGQDKPCKETCDCCGERGQCVCEGPCICRQGYFWIAAYKLGNCK

SEQ ID NO: 253 - protein, 42 aa, Atrax robustus
CAKKRNWCGKNEDCCCPMKCIYAWYNQQGSCQTTITGLFKKC

SEQ ID NO: 254 - protein, 42 aa, Hadronyche versuta
CAKKRNWCGKTEDCCCPMKCVYAWYNEQGSCQSTISALWKKC

SEQ ID NO: 255 - protein, 42 aa, Hadronyche versuta
CSRSDGWCGKTEDCCCPMKCIKAWYKQNGNCQNTISAIWKNC

SEQ ID NO: 256 - protein, 42 aa, Illawara wisharti
CAKKRNWCGKNEDCCCPMKCIYAWYNQQGSCQSTITGLFKKC

SEQ ID NO: 257 - protein, 105 aa, Macrothele gigas
MKTLVIACVALVLVVVHGEVIEEVNEKQLQESVEEKYSLLQRLEKLDEAITAEENRNSRVRRCGSKRAWCKEKKDCCCGYNCVYAWYNQQSSCERKWKYLFTGEC

SEQ ID NO: 258 - protein, 70 aa, Macrothele gigas
MKILEKALLENDSAAEEESRNLRTKRCARKRAWCEKTENCCCPMKCIYAWYNGQSSCDHTISTIWTSCPK

SEQ ID NO: 259 - protein, 37 aa, Hadronyche formidabilis
SPTCTGADRPCAACCPCCPGTSCKGPEPNGVSYCRND

SEQ ID NO: 260 - protein, 36 aa, Hadronyche versuta
TICTGADRPCAACCPCCPGTSCQGPESNGVVYCRNF

SEQ ID NO: 261 - protein, 36 aa, Hadronyche versuta
TICTGADRPCAACCPCCPGTSCQGPEPNGVSYCRND

SEQ ID NO: 262 - protein, 37 aa, Hadronyche versuta
AICTGADRPCAACCPCCPGTSCKAESNGVSYCRKDEP

SEQ ID NO: 263 - protein, 74 aa, Hadronyche versuta
MNTATCFIVLLDVATVIGGIEAGESDMRKDVMGLFRRAICTGADRPCAACCPCCPGTSCKAESNGVSYCRKDEP

SEQ ID NO: 264 - protein, 74 aa, Hadronyche versuta
MNTATCFIVLLVVATVIGGIEAGEFDMRKDVMGLFRRAICTGADRPCAACCPCCPGTSCKAESNGVSYCRKDEP

SEQ ID NO: 265 - protein, 74 aa, Hadronyche versuta
MNTATCFIVFLVVATVIGGIEAGESDMRKDVMGLFRRAICTGADRPCAACCPCCPGTSCKAESNGVSYCRKDEP

SEQ ID NO: 266 - protein, 74 aa, Hadronyche versuta
MNTATCFIVLLVVATVIGGIEAGESDMRKDVMGLFRRVICTGADSPCAACCPCCPGTSCKAESNGVSYCRKDEP

SEQ ID NO: 267 - protein, 74 aa, Hadronyche versuta
MNTATCFIVLLVVATVIGGIEAGEFDMRKDVMGLFRRAICPGADRPCAACCPCCPGTSCKAESNGVFYCRKDEP

SEQ ID NO: 268 - protein, 29 aa, Eucratoscelus constrictus
YCQKFLWTCDTERKCCEDMVCELWCKLEK

SEQ ID NO: 269 - protein, 29 aa, Eucratoscelus constrictus
YCQKFLWTCDTERKCCEDMVCELWCKYKE

SEQ ID NO: 270 - protein, 36 aa, Agelenopsis aperta
ECVPENGHCRDWYDECCEGFYCSCRQPPKCICRNNN

SEQ ID NO: 271 - protein, 37 aa, Agelenopsis aperta
ECATKNKRCADWAGPWCCDGLYCSCRSYPGCMCRPSS

SEQ ID NO: 272 - protein, 38 aa, Agelenopsis aperta
ADCVGDGQRCADWAGPYCCSGYYCSCRSMPYCRCRSDS

SEQ ID NO: 273 - protein, 37 aa, Agelenopsis aperta
ACVGENQQCADWAGPHCCDGYYCTCRYFPKCICRNNN

SEQ ID NO: 274 - protein, 37 aa, Agelenopsis aperta
ACVGENKQCADWAGPHCCDGYYCTCRYFPKCICRNNN

SEQ ID NO: 275 - protein, 37 aa, Agelenopsis aperta
DCVGESQQCADWAGPHCCDGYYCTCRYFPKCICVNNN

SEQ ID NO: 276 - protein, 36 aa, Hololena curta
SCVGEYGRCRSAYEDCCDGYYCNCSQPPYCLCRNNN

SEQ ID NO: 277 - protein, 38 aa, Hololena curta; identical to SEQ ID NO: 272

SEQ ID NO: 278 - protein, 38 aa, Hololena curta
ADCVGDGQKCADWFGPYCCSGYYCSCRSMPYCRCRSDS

SEQ ID NO: 279 - protein, 94 aa, Diguetia canities
MKVFVVLLCLSLAAVYALEERLDKDADIMLDSPADMERAKDGDVEGPAGCKKYDVECDSGECCQKQYLWYKWRPLDCRCLKSGFFSSKCVCRDV

SEQ ID NO: 280 - protein, 58 aa, Diguetia canities
AKDGDVKGPAGCMKYKSGDCRGKTCCDQQYLWYKWRNLACRCFTVEVFKKDCWCNDIS

SEQ ID NO: 281 - protein, 121 aa, Macrothele gigas
MMTLSPFLLLLIAAVVIGNASEGEVKNEFEERLKDEFKDPSRSEVAEVILLRELEVLEETLFGKEMTSDTEENRNSREKRCMGYDIECNENLPCCKHRKLECVETSGYWWYKRKYCRPIKG

SEQ ID NO: 282 - protein, 38 aa, Macrothele gigas
CMGYDIHCTDRLPCCFGLECVKTSGYWWYKKTYCRRKS

SEQ ID NO: 283 - protein, 99 aa, Macrothele gigas
TSQGTTPDKVQLEVNCISNLPNNEVEETDLLRELEMIEENLFGKELSFVPEENRNSRHKRCMGYDIECNERLHCCADLECVKTSGRWWYKKTYCRRKSG

SEQ ID NO: 284 - protein, 46 aa, Macrothele gigas
GGCIKWNHSCQTTTLKCCGKCVVCYCHTPWGTNCRCDRTRLFCTED

SEQ ID NO: 285 - protein, 87 aa, Haplopelma huwenum; identical to SEQ ID NO: 232

SEQ ID NO: 286 - protein, 39 aa, Missulena bradleyi
SPVCTPSGQPCQPNTQPCCNNAEEEQTINCNGNTVYRCA

SEQ ID NO: 287 - protein, 48 aa, Agelenopsis aperta
KKKCIAKDYGRCKWGGTPCCRGRGCICSIMGTNCECKPRLIMEGLGLA

SEQ ID NO: 288 - protein, 83 aa, Agelenopsis aperta
MKLCMTLLITAIAVVTFVVATQEESAEFNEVEESREDNCIAEDYGKCTWGGTKCCRGRPCRCSMIGTNCECTPRLIMEGLSFA

SEQ ID NO: 289 - protein, 83 aa, Agelenopsis aperta; identical to SEQ ID NO: 288

SEQ ID NO: 290 - protein, 85 aa, Atrax robustus
MNTATGFIVLLVLATVLGAIEAEDAVPDFEGGFASHAREDTVGGKIRRSSVCIPSGQPCPYNEHCCSGSCTYKENENGNTVQRCD

SEQ ID NO: 291 - protein, 37 aa, Atrax robustus
SSVCIPSGQPCPYNEHCCSGSCTYKENENGNTVQRCD

SEQ ID NO: 292 - protein, 73 aa, Atrax robustus
MNTATGFIVLLVLATVLGCIEAGESHVREDAMGRARRGACTPTGQPCPYNESCCSGSCQEQLNENGHTVKRCV

SEQ ID NO: 293 - protein, 78 aa, Atrax robustus
MNTATGVIALLVLATVIGCIEAEDTRADLQGGEAAEKVFRRSPTCIPSGQPCPYNENCCSQSCTFKENENGNTVKRCD

SEQ ID NO: 294 - protein, 78 aa, Atrax robustus
MNTATGVIALLVLVTVIGCIEAEDTRADLQGGEAAEKVFRRSPTCIPSGQPCPYNENCCSQSCTFKENENGNTVKRCD

SEQ ID NO: 295 - protein, 78 aa, Atrax robustus
MNTATGVIALLVLATVIGCIEAEDTRADLQGGEAAEKVFRRSPTCIPSGQPCPYNENCCSKSCTYKENENGNTVQRCD

SEQ ID NO: 296 - protein, 78 aa, Atrax robustus
MNTATGVIALLVLATVIGCIEAEDTRADLQGGEAAEKVFRRSPTCIPSGQPCPYNENCCSQSCTFKENETGNTVKRCD

SEQ ID NO: 297 - protein, 76 aa, Atrax robustus
MNTATGFIVLLVLATVLGGIEAGESHMRKDAMGRVRRQYCVPVDQPCSLNTQPCCDDATCTQELNENDNTVYYCRA

SEQ ID NO: 298 - protein, 78 aa, Atrax robustus
MNTATGVIALLVLATVIGCIEAEDTRADLQGGEAAEKVFRRSPTCIPSGQPCPYNENCCSQSCTFKENENANTVKRCD

SEQ ID NO: 299 - protein, 98 aa, Atrax robustus
MKFSKLSLTLALILTQALFVLCGKINEDFMKNGLESQTLHDEIRKPIDSENPDTERLLDCLLDNRVCSSDRDCCGMTPSCTMGLCVPNVGGLVGGILG

SEQ ID NO: 300 - protein, 98 aa, Atrax robustus
MKFSKLSLTLALILTQVLFVLCGKINEDFMKHGLESQALHDEIRKPIDSENPDTERLLDCLLDNRVCSSDKDCCGMTPSCTMGLCVPSVGGLVGGILG

SEQ ID NO: 301 - protein, 96 aa, Atrax robustus
MKFSKLSITLAVILTQAVFVFCGMTNEDFMEKGLESNELPDAIKKPVNSGKPDTKRLLDCVLSRMCFSNANCCGLTPPCKMGLCVPNVGGLLGGIL

SEQ ID NO: 302 - protein, 96 aa, Atrax robustus
MKFSKLSITLAVILTQAVFVFCGMTNEDFMEKGLESNELHDAIKKPVNSGKPDTERLLDCVLSRMCSSDANCCGLTPTCKMGLCVPNVGGLLGGIL

SEQ ID NO: 303 - protein, 97 aa, Atrax robustus
MKFSKLSITLAVILTQAVFVFCGMTNEDFMEKGFKSNDLQYAIKQPVNSGKPDTERLLDCVLSRVCSSDENCCGLTPTCTMGLCVPNVGGLLGGLLS

SEQ ID NO: 304 - protein, 97 aa, Atrax robustus
MKFSKLSITLVVILTQAVFVFCGMTNEDFMEKGFKSNDLQYAIRQPVNSGKPDTERLLDCVLSRVCSSDENCCGLTPTCTMGLCVPNVGGLLGGLLS

SEQ ID NO: 305 - protein, 100 aa, Atrax robustus
MKFSKLSITLAVILTQAVFVLCGMKNEDFMEKGLESNELHDAIKKPVNSGKPDTERLLDCVLSRVCSPDANCCGLTPICKMGLCVPKVGGLLGGLLGGIL

SEQ ID NO: 306 - protein, 100 aa, Atrax robustus
MKFSKLSITLAVILTQAVFVLCGMKNEDFMEKGLESNELHDAIKKPVNSGKPDTERLLDCVLSRVCSSDANCCGLTPTCKMGLCVPKVGGLLGGLLGGIL

SEQ ID NO: 307 - protein, 37 aa, Hadronyche formidabilis
SPTCIRSGQPCPYNENCCSQSCTFKTNENGNTVKRCD

SEQ ID NO: 308 - protein, 36 aa, Hadronyche infensa
STCTPTDQPCPYHESCCSGSCTYKANENGNQVKRCD

SEQ ID NO: 309 - protein, 78 aa, Hadronyche infensa
MNTATGFIVLLVLATVIGCISADFQGSFEPYEEEDAERIFRRSTCTPTDQPCPYHESCCSGSCTYKANENGNQVKRCD

SEQ ID NO: 310 - protein, 78 aa, Hadronyche infensa
MNTATGFIVLLVLATVIGCISADFQGGFEPYEEEDAERIFRRSTCTPTDQPCPYHESCCSGSCTYKANENGNQVKRCD

SEQ ID NO: 311 - protein, 37 aa, Hadronyche infensa
SPTCIPTGQPCPYNENCCSQSCTYKANENGNQVKRCD

SEQ ID NO: 312 - protein, 79 aa, Hadronyche infensa
MNTATGFIVLLVLATVIGCISADFQGGFEPYEEEDAQRIFRRSPTCIPTGQPCPYNENCCSQSCTYKANENGNQVKRCD

SEQ ID NO: 313 - protein, 79 aa, Hadronyche infensa
MNTATGFIVLLVLATVIGCISADFQGGFEPYEEEDAERIFRRSPTCIPTGQPCPYNENCCSQSCTYKANENGNQVKRCD

SEQ ID NO: 314 - protein, 79 aa, Hadronyche infensa
MNTATGFIVLLVLATVIGCISVDFQGGFESYEEEDAERIFRRSPTCIPTGQPCPYNENCCSQSCTYKANENGNQVKRCD

SEQ ID NO: 315 - protein, 79 aa, Hadronyche infensa
MNTATGFIVLLVLATVIGCISTDFQGGFEPYEEEDAERIFRRSPTCIPTGQPCPYNENCCSQSCTYKANENGNQVKRCD

SEQ ID NO: 316 - protein, 37 aa, Hadronyche infensa
SSTCIRTDQPCPYNESCCSGSCTYKANENGNQVKRCD

SEQ ID NO: 317 - protein, 78 aa, Hadronyche infensa
MNTATGFIVLLVLATVIGCISADFQGGFESSVEDAERLFRRSSTCIRTDQPCPYNESCCSGSCTYKANENGNQVKRCD

SEQ ID NO: 318 - protein, 37 aa, Hadronyche versuta; identical to SEQ ID NO: 62

SEQ ID NO: 319 - protein, 37 aa, Hadronyche versuta
SSTCIPSGQPCPYNENCCSQSCTYKENENGNTVKRCD

SEQ ID NO: 320 - protein, 37 aa, Hadronyche versuta
SSTCIPSGQPCPYNENCCSQSCTFKENENGNTVKRCD

SEQ ID NO: 321 - protein, 37 aa, Hadronyche versuta
SPTCIPSGQPCPYNENCCSKSCTYKENENGNTVQRCD

SEQ ID NO: 322 - protein, 37 aa, Hadronyche versuta
SPTCIPSGQPCPYNENCCSQSCTYKENENGNTVKRCD

SEQ ID NO: 323 - protein, 37 aa, Hadronyche versuta
SAVCIPSGQPCPYSKYCCSGSCTYKTNENGNSVQRCD

SEQ ID NO: 324 - protein, 76 aa, Hadronyche versuta; identical to SEQ ID NO: 297

SEQ ID NO: 325 - protein, 76 aa, Hadronyche versuta
MNTTTGFIVLLVLATILGGIEAGESHMRKDAMGRVRRQYCVPVDQPCSLNTQPCCDDATCTQELNENDNTVYYCRA

SEQ ID NO: 326 - protein, 76 aa, Hadronyche versuta
MNTATGFIVFLVLATVLGGIEAGESHMRKDAMGRVRRQYCVPVDQPCSLNTQPCCDDATCTQELNENDNTVYYCRA

SEQ ID NO: 327 - protein, 45 aa, Hadronyche versuta
LLACLFGNGRCSSNRDCCELTPVCKRGSCVSSGPGLVGGILGGIL

SEQ ID NO: 328 - protein, 98 aa, Hadronyche versuta
MKFSKLSLTLALILTQAIFVLCGKINEDFMKNDLESQALHDEIRKPIDSENPDTERLLDCLLDNRVCSSDKDCCGMTPSCTMGLCVPSVGGLVGGILG

SEQ ID NO: 329 - protein, 98 aa, Hadronyche versuta
MKFSKLSLTLALILTQAIFVLCGKINEDFMKNDLESQALRDEIRKPIDSENPDTERLLDCLLDNRVCSSDKDCCGMTPSCTMGLCVPSVGGLVGGILG

SEQ ID NO: 330 - protein, 98 aa, Hadronyche versuta
MKFSKLSLTLALILTQAIFVLCGKINEDFMKNDLESHALHDEIRKPINSENPDTERLLDCLLDNRVCSSDKDCCGMTPSCTMGLCVPSVGGLVGGILG

SEQ ID NO: 331 - protein, 98 aa, Hadronyche versuta
MKFSKLSLTLALILTQALFVLCGKINEDFMKNGLESQALHDEIRKPIDSENPDTERLLDCLLDNRVCSSDKDCCGMTPSCTMGLCVPSVGGLVGGILG

SEQ ID NO: 332 - protein, 98 aa, Hadronyche versuta
MKFSKLSLTLALILTQVIFVLCGKINEDFMKNGLESQALHDEIRKPIDSENPDTERLLDCLLDNRVCSSDKDCCGMTPSCTMGLCVPSVGGLVGGILG

SEQ ID NO: 333 - protein, 93 aa, Hadronyche versuta
MKFSKLSLTLALILTQALFVLCDFMKNGLESQALHDEIRKSIDSENPDTERLLDCLLDNRVCSSDKDCCGMTPSCTMGLCVPSVGGLVGGILG

SEQ ID NO: 334 - protein, 98 aa, Hadronyche versuta
MKFSKLSLTLALILTQAIFVLCGKINEDFMKNDLESQALHDEIRKPINSENPDTERLLDCLLDNRVCSSDKDCCGMTPSCTMGLCVPSVGGLVGGILG

SEQ ID NO: 335 - protein, 98 aa, Hadronyche versuta
MKFSKLSLTLALILTQALFVLCGKINEDFMKNGLESQALHDEIRKPIDSENPDTERLLDCLLDNRVCSSDRDCCGMTPSCTMGLCVPNVGGLVGDILG

SEQ ID NO: 336 - protein, 98 aa, Hadronyche versuta
MKFSKLSLTLALILTQALFVLCGKINEDFMKNGLESQALHDEIRKPIDSENPDTERLLDCLLDNRVCSSDKDCCGMTPSCTMGLCVPNVGGLVGGILG

SEQ ID NO: 337 - protein, 93 aa, Hadronyche versuta
MKFSKLSLTLALILTQALFVLCDFMKNGLESQALHDEIRKPIDSENPDTERLLDCLLDNRVCSSDKDCCGMTPSCTMGLCVPNVGGLVGGILG

SEQ ID NO: 338 - protein, 97 aa, Hadronyche versuta
MKFSKLSLTLALILTQVLFVLCGKIEDFMKNGLESQALHDEIRKPIDSENPDTERLLDCLLDNRVCSSDKDCCGMTPSCTMGLCVPNVGGLVGGILG

SEQ ID NO: 339 - protein, 98 aa, Hadronyche versuta
MKFSKLSLTLALILTQAIFVLCGKINEDFMKNDLESQALHDEIRKPINSENPDTERLLDCLLDSRVCSSDKDCCGMTPSCTMGLCVPSVGGLVGGILG

SEQ ID NO: 340 - protein, 98 aa, Hadronyche versuta
MKFSKLSLTLALILTQALFVLCGKINEDFMKNGLESQALHDEIRKPIDSENPDTERLLDCLLDNRICSSDKDCCGMTPSCTMGLCVPNVGGLVGGILG

SEQ ID NO: 341 - protein, 101 aa, Hadronyche versuta
MKFSKLSLTLALILTQALFVLCGKINEDFMEHGLESHALHDEIRKPIDTEKADAERLVDCVVNTLGCSSDKDCCGMTPSCTLGICAPSVRGLVGGLLGRAL

SEQ ID NO: 342 - protein, 101 aa, Hadronyche versuta
MKFSKLSLTLALILTQALFVLCMKINEDFMENGLESHALHDEIRKPIDTEKADAERLVDCVVNTLGCSSDKDCCGMTPSCTLGICAPSVGGLVGGLLGRAL

SEQ ID NO: 343 - protein, 101 aa, Hadronyche versuta
MKFSKLSLTLALILTQALFVLCGKINEDFMENGLESHALHDEIRKPIDTEKADAERLVDCVVNTLGCSSDKDCCGMTPSCTLGICAPSVGGLVGGLLGRAL

SEQ ID NO: 344 - protein, 101 aa, Hadronyche versuta
MKFSKLSLTFALILTQALFVLCGKINEDFMDNGLESHALHDEIRKPIHTEKADAERLVDCVLNTLGCSSDKDCCGMTPSCTLGICAPSVGGLVGGLLGRAL

SEQ ID NO: 345 - protein, 101 aa, Hadronyche versuta
MKFSKLSLTLALILTQALFVLCGKINEDFMENGLESHALHDEIRKPIDTEKADAERVLDCVVNTLGCSSDKDCCGMTPSCTLGICAPSVGGLVGGLLGRAL

SEQ ID NO: 346 - protein, 95 aa, Hadronyche versuta
MKFSKLSLTFALILTQTLLVLCDFMENGLESHALHDEIRKPIDTEKADAERVLDCVVNTLGCSSDKDCCGMTPSCTLGICAPSVGGLVGGLLGRA

SEQ ID NO: 347 - protein, 100 aa, Hadronyche versuta
MKFSKLSLTLALILTQALFVLCGKINEDFMENGLESHALHDEIRKPIDTEKADAERLVDCVVNTLGCSSDKDCCGMTPSCTLGICAPSVGLVGGLLGRAL

SEQ ID NO: 348 - protein, 101 aa, Hadronyche versuta
MKFSKLSLTLALILTQALLVLCGKINEDFMENGLESHALHDEIRKPLDTENPDTERQLDCVLNTLGCSSDKDCCGMTPSCTLGICAPNVGGLVGGLLGRAL

SEQ ID NO: 349 - protein, 101 aa, Hadronyche versuta
MKFSKLSLTLALILTQVLLVVCGKINEDFMENGLESHALHDEIRKPIDTEKADAERVLDCVVNTLGCSSDKDCCGMTPSCTLGICAPSVGGIVGGLLGRAL

SEQ ID NO: 350 - protein, 101 aa, Hadronyche versuta
MKFSKLSLTLALILTQALLVVCGKINEDFMENGLESHALHDEIRKPIDTEKADAERVLDCVVNTLGCSSDKDCCGMTPSCTLGICAPSVGGIVGGLLGRAL

SEQ ID NO: 351 - protein, 101 aa, Hadronyche versuta
MKFSKLSLTLALILTQALLVVCGKINEDFMENGLESHALHDEIRKSIDTEKADAERVLDCVVNTLGCSSDKDCCGMTPSCTLGICAPSVGGIVGGLLGRAL

SEQ ID NO: 352 - protein, 101 aa, Hadronyche versuta
MKFSKLSLTLALILAQAIFVLCGKINEDFMENGLESHALHDEIRKPIDTEKADAERVVDCVLNTLGCSSDKDCCGMTPSCTLGICAPSVGGLVGGLLGRAL

SEQ ID NO: 353 - protein, 101 aa, Hadronyche versuta
MKFSKLSLTLALILTQALLVVCGKINEDFMENGLESHALHDEIRKPIDTEKADAERVLDCVVNILGCSSDKDCCGMTPSCTLGICAPSVGGIVGGLLGRAL

SEQ ID NO: 354 - protein, 83 aa, Hadronyche venenata
MNTATGVIALLVLATVIGCIEAETRADLQGAFESYEGEAAEKIFRRSPTCIPSGQPCPYNENCCSKSCTYKEMKTATPVQRCD

SEQ ID NO: 355 - protein, 84 aa, Hadronyche venenata
MNTATGVIALVVLATVIGCIEAEETRADLQGAFESYEGEAADKIFRRSPTCIPSGQPCPYNENCCSKSCTYKENENGNTVQRCD

SEQ ID NO: 356 - protein, 84 aa, Hadronyche venenata
MNTATGVIALLVLATVIGCIEAEETRADLQGAFESYEGEGADKIFRRSPTCIPSGQPCPYNENCCSKSCTYKENENGNTVQRCD

SEQ ID NO: 357 - protein, 84 aa, Hadronyche venenata
MNTATGVIALLVLATVIGCIEVEETRADLQGAFESYEGEAAEKIFRRSPTCIPSGQPCPYNENCCSKSCTYKENENGNTVQRCD

SEQ ID NO: 358 - protein, 84 aa, Hadronyche venenata
MNTATGVIALLVLATVIGCIEAEETRADLQGAFESYEGEAADKIFRRSPTCIPSGQPCPYNENCCSKSCTYKENENGNTVQRCD

SEQ ID NO: 359 - protein, 84 aa, Hadronyche venenata
MNTATGVIALLVLATVIGCIEAEDTRADLQGGLESYEGEAADKIFRRSPTCIPSGQPCPYNENCCSKSCTYKENENGNTVQRCD

SEQ ID NO: 360 - protein, 100 aa, Illawara wisharti; identical to SEQ ID NO: 305

SEQ ID NO: 361 - protein, 55 aa, Oxyopes lineatus
AWKCLPKDSTCGDDCDCCEGLHCHCPLRNMLPAILRCSCQSKDDHINTCPKYKKS

SEQ ID NO: 362 - protein, 44 aa, Plectreurys tristis
ADCSATGDTCDHTKKCCDDCYTCRCGTPWGANCRCDYYKARCDT

SEQ ID NO: 363 - protein, 39 aa, Aphonopelma sp.
LFECVLSCDIKKNGKPCKPKGEKKCSGGWRCKINFCLKV

SEQ ID NO: 364 - protein, 39 aa, Aphonopelma sp.
IFECVFSCDIEKEGKPCKPKGEKKCTGGWKCKIKLCLKI

SEQ ID NO: 365 - protein, 39 aa, Aphonopelma sp.
IFECVFSCDIEKEGKPCKPKGEKKCSGGWKCKIKLCLKI

SEQ ID NO: 366 - protein, 39 aa, Brachypelma albiceps
ILECVFSCDIKKEGKPCKPKGEKKCTGGWRCKIKLCLKI

SEQ ID NO: 367 - protein, 39 aa, Brachypelma albiceps
IFECVFSCDIKKEGKPCKPKGEKKCTGGWRCKIKLCLKI

SEQ ID NO: 368 - protein, 39 aa, Brachypelma smithi; identical to SEQ ID NO: 365

SEQ ID NO: 369 - protein, 99 aa, Brachypelma smithi
MNTIQVIIFAVVLVLTVTVGQADEDSAETSLLRKLEEAEAAMFGQYLEESKNSREKRCIGESVPCDKDDPRCCREYECLKPTGYGWWYASYYCYRKKSG

SEQ ID NO: 370 - protein, 86 aa, Haplopelma huwenum
MKSIVFVALFGLALLAVVCSASEDAHKELLKEVVRAMVVDKTDAVQAEERECRWYLGGCSQDGDCCKHLQCHSNYEWCVWDGTFSK

SEQ ID NO: 371 - protein, 47 aa, Anemonia erythraea
GAPCLCANSGPNTRGNDLNGIVWVFGCPSGWHDCHGRAMVGYCCQED

SEQ ID NO: 372 - protein, 42 aa, Anthopleura elegantissima
GTTCYCGKTIGIYWFGTKTCPSNRGYTGSCGYFLGICCYPVD

SEQ ID NO: 373 - protein, 42 aa, Anthopleura elegantissima
GTACSCGNSKGIYWFYRPSCPTDRGYTGSCRYFLGTCCTPAD

SEQ ID NO: 374 - protein, 43 aa, Anemonia sulcata
AAPCFCSGKPGRGDLWILRGTCPGGYGYTSNCYKWPNICCYPH

SEQ ID NO: 375 - protein, 43 aa, Anemonia sulcata
AAPCFCPGKPDRGDLWILRGTCPGGYGYTSNCYKWPNICCYPH

SEQ ID NO: 376 - protein, 48 aa, Bunodosoma granulifera
GASCRCDSDGPTSRGNTLTGTLWLIGRCPSGWHNCRGSGPFIGYCCKQ

SEQ ID NO: 377 - protein, 48 aa, Bunodosoma granulifera
GASCRCDSDGPTSRGDTLTGTLWLIGRCPSGWHNCRGSGPFIGYCCKQ

SEQ ID NO: 378 - protein, 47 aa, Anthopleura elegantissima
GIACLCDSDGPSVRGNTLSGTYWLAGCPSGWHNCKSSGQLIGACCKQ

SEQ ID NO: 379 - protein, 47 aa, Anthopleura elegantissima
GVPCLCDSDGPNVRGNTLSGTYWLAGCPSGWHNCKSSGPLIGACCKQ

SEQ ID NO: 380 - protein, 46 aa, Anemonia sulcata
GAACLCKSDGPNTRGNSMSGTIWVFGCPSGWNNCEGRAIIGYCCKQ

SEQ ID NO: 381 - protein, 47 aa, Anthopleura fuscoviridis
GVACLCDSDGPNVRGNTLSGTIWLAGCPSGWHNCKAHGPTIGWCCKQ

SEQ ID NO: 382 - protein, 48 aa, Heteractis crispa
ASCKCDDDGPDVRSATFTGTVDFAYCNAGWEKCLAVYTPVASCCRKKK

SEQ ID NO: 383 - protein, 48 aa, Stoichactis helianthus
AACKCDDEGPDIRTAPLTGTVDLGSCNAGWEKCASYYTIIADCCRKKK

SEQ ID NO: 384 - protein, 47 aa, Anthopleura elegantissima
GVPCLCDSDGPSVRGNTLSGILWLAGCPSGWHNCKAHGPTIGWCCKQ

SEQ ID NO: 385 - protein, 47 aa, Anthopleura elegantissima
GVPCLCDSDGPNVRGNTLSGILWLAGCPSGWHNCKAHGPTIGWCCKQ

SEQ ID NO: 386 - protein, 47 aa, Anemonia sulcata
GVPCLCDSDGPSVRGNTLSGIIWLAGCPSGWHNCKKHGPTIGWCCKQ

SEQ ID NO: 387 - protein, 48 aa, Anthopleura fuscoviridis
GGVPCLCDSDGPSVRGNTLSGIIWLAGCPSGWHNCKAHGPTIGWCCKQ

SEQ ID NO: 388 - protein, 48 aa, Heteractis crispa
GTCKCDDDGPDVRTATFTGSTEFANCNESWEKCLAVYTPVASCCRKKK

SEQ ID NO: 389 - protein, 48 aa, Radianthus paumotensis
ASCKCDDDGPDVRSATFTGTVDFWNCNEGWEKCTAVYTPVASCCRKKK

SEQ ID NO: 390 - protein, 31 aa, Parasicyonis actinostoloides
AGGKSTCCPCAMCKYTAGCPWGQCAHHCGCS

SEQ ID NO: 391 - protein, 48 aa, Heteractis crispa
GNCKCDDEGPYVRTAPLTGYVDLGYCNEGWEKCASYYSPIAECCRKKK

SEQ ID NO: 392 - protein, 48 aa, Radianthus paumotensis
GNCKCDDEGPNVRTAPLTGYVDLGYCNEGWEKCASYYSPIAECCRKKK

SEQ ID NO: 393 - protein, 48 aa, Heteractis crispa
GNCKCDDEGPNVRTAPLTGYVDLGYCNEGWDKCASYYSPIAECCRKKK

SEQ ID NO: 394 - protein, 46 aa, Anemonia sulcata
GVPCLCDSDGPSVRGNTLSGILWLAGCPSGWHNCKKHKPTIGWCCK

SEQ ID NO: 395 - protein, 47 aa, Heteractis crispa
GNCKCDDEGPNVRTAPLTGYVDLGYCNEGWEKCASYYSPIAECCRKK

SEQ ID NO: 396 - protein, 49 aa, Anthopleura xanthogrammica
GVSCLCDSDGPSVRGNTLSGTLWLYPSGCPSGWHNCKAHGPTIGWCCKQ

SEQ ID NO: 397 - protein, 49 aa, Anthopleura xanthogrammica
GVPCLCDSDGPRPRGNTLSGILWFYPSGCPSGWHNCKAHGPNIGWCCKK

SEQ ID NO: 398 - protein, 47 aa, Anthopleura elegantissima; identical to SEQ ID NO: 384

SEQ ID NO: 399 - protein, 36 aa, Actinia equina
GCKDNFSANTCKHVKANNNCGSQKYATNCAKTCGKC

SEQ ID NO: 400 - protein, 37 aa, Bunodosoma granulifera
VCRDWFKETACRHAKSLGNCRTSQKYRANCAKTCELC

SEQ ID NO: 401 - protein, 48 aa, Bunodosoma caissarum
GVACRCDSDGPTSRGNTLTGTLWLTGGCPSGWHNCRGSGPFIGYCCKK

SEQ ID NO: 402 - protein, 41 aa, Bunodosoma caissarum
GLPCDCHGHTGTYWLNYYSKCPKGYGYTGRCRYLVGSCCYK

SEQ ID NO: 403 - protein, 48 aa, Bunodosoma cangicum
GVACRCDSDGPTVRGNSLSGTLWLTGGCPSGWHNCRGSGPFIGYCCKK

SEQ ID NO: 404 - protein, 35 aa, Stoichactis helianthus
RSCIDTIPKSRCTAFQCKHSMKYRLSFCRKTCGTC

SEQ ID NO: 405 - protein, 47 aa, Anthopleura xanthogrammica
GVPCLCDSDGPNVRGNTLSGTYWLAGCPSGWHNCKSSGPNIGWCCKK

SEQ ID NO: 406 - protein, 47 aa, Anthopleura xanthogrammica
GVACLCDADGPSVSGNTLSGILWLAGCPSGWHNCKAHGPTIGWCCKK

SEQ ID NO: 407 - protein, 47 aa, Anthopleura xanthogrammica
GAACFCDSDGPSVSGNTLSGILWLAGCPSGWHNCKAHGPNIGWCCKK

SEQ ID NO: 408 - protein, 47 aa, Anthopleura xanthogrammica
GVPCLCDSDGPSVRGNSLSGIIWLFGCPSGWHNCRDHGPTIGWCCKK

SEQ ID NO: 409 - protein, 49 aa, Anthopleura xanthogrammica
GVSCLCDSDGPSVRGNTLSGILWFYPSGCPSGWHNCKAHGPTIGWCCKQ

SEQ ID NO: 410 - protein, 48 aa, Bunodosoma cangicum
GVACRCDSDGPTVRGDSLSGTLWLTGGCPSGWHNCRGSGPFIGYCCKK

SEQ ID NO: 411 - protein, 48 aa, Bunodosoma cangicum
GVACRCDSDGPTVHGDSLSGTLWLTGGCPSGWHNCRGSGPFIGYCCKK

SEQ ID NO: 412 - protein, 681 aa, Bacillus thuringiensis
MGGIDMNPYQNKNEYEIFNAPSNGFSKSNNYSRYPLANKPNQPLKNTNYKDWLNVCQDNQQYGNNAGNFASSETIVGVSAGIIVVGTMLGAFAAPVLAAGIISFGTLLPIFWQGSDPANVWQDLLNIGGRPIQEIDKNIINVLTSIVTPIKNQLDKYQEFFDKWEPARTHANAKAVHDLFTTLEPIIDKDLDMLKNNASYRIPTLPAYAQIATWHLNLLKHAATYYNIWLQNQGINPSTFNSSNYYQGYLKRKIQEYTDYCIQTYNAGLTMIRTNTNATWNMYNTYRLEMTLTVLDLIAIFPNYDPEKYPIGVKSELIREVYTNVNSDTFRTITELENGLTRNPTLFTWINQGRFYTRNSRDILDPYDIFSFTGNQMAFTHTNDDRNIIWRAVHGNIISQDTSKVFPFYRNKPIDKVEIVRHREYSDIIYEMIFFSNSSEVFRYSSNSTIENNYKRTDSYMIPKQTWKNEEYGHTLSYIKTDNYIFSVVRERRRVAFSWTHTSVDFQNTIDLDNITQIHALKTLKVSSNSKIVKGLGHTSENLVILKDSMNFRVRFLKNVSQQYQVRIRYATNAPKTTVFLTGIDTISVELPSTTSRQNPNATDLTYADFGYVTFSRTVSNKTFEGEDTFINDLYYGTPNHSYNIYIDKIEFIPITQSVLDYTEKQNIEKTQKIVNDLFVN

SEQ ID NO: 413 - protein, 109 aa, Bacillus thuringiensis
FAVYTILDIHYANKPNQPLKNTNYKDWLNVCQDNQQYGNNAGNFASSETIVGVSAGIIVVGTMLGAFAAPVLAAGIISFGTLLPIFWQGSDPANVWQDLLNIGGRPIQE

SEQ ID NO: 414 - protein, 69 aa, Bacillus thuringiensis
MEVRTQTFYQNPNNEPIAPRDIINQILTAPAPADLFFKNADINVKFTQWFQSTLYGWNIKLGTQTVLSM

SEQ ID NO: 415 - protein, 1176 aa, Bacillus thuringiensis
MDNNPNINECIPYNCLSNPEVEVLGGERIETGYTPIDISLSLTQFLLSEFVPGAGFVLGLVDIIWGIFGPSQWDAFLVQIEQLINQRIEEFARNQAISRLEGLSNLYQIYAESFREWEADPTNPALREEMRIQFNDMNSALTTAIPLFAVQNYQVPLLSVYVQAANLHLSVLRDVSVFGQRWGFDAATINSRYNDLTRLIGNYTDYAVRWYNTGLERVWGPDSRDWVRYNQFRRELTLTVLDIVALFSNYDSRRYPIRTVSQLTREIYTNPVLENFDGSFRGMAQRIEQNIRQPHLMDILNSITIYTDVHRGFNYWSGHQITASPVGFSGPEFAFPLFGNAGNAAPPVLVSLTGLGIFRTLSSPLYRRIILGSGPNNQELFVLDGTEFSFASLTTNLPSTIYRQRGTVDSLDVIPPQDNSVPPRAGFSHRLSHVTMLSQAAGAVYTLRAPTFSWQHRSAEFNNIIPSSQITQIPLTKSTNLGSGTSVVKGPGFTGGDILRRTSPGQISTLRVNITAPLSQRYRVRIRYASTTNLQFHTSIDGRPINQGNFSATMSSGSNLQSGSFRTVGFTTPFNFSNGSSVFTLSAHVFNSGNEVYIDRIEFVPAEVTFEAEYDLERAQKAVNELFTSSNQIGLKTDVTDYHIDQVSNLVECLSDEFCLDEKQELSEKVKHAKRLSDERNLLQDPNFRGINRQLDRGWRGSTDITIQGGDDVFKENYVTLLGTFDECYPTYLYQKIDESKLKAYTRYQLRGYIEDSQDLEIYLIRYNAKHETVNVPGTGSLWPLSAQSPIGKCGEPNRCAPHLEWNPDLDCSCRDGEKCAHHSHHFSLDIDVGCTDLNEDLGVWVIFKIKTQDGHARLGNLEFLEEKPLVGEALARVKRAEKKWRDKREKLEWETNIVYKEAKESVDALFVNSQYDQLQADTNIAMIHAADKRVHSIREAYLPELSVIPGVNAAIFEELEGRIFTAFSLYDARNVIKNGDFNNGLSCWNVKGHVDVEGQNNQRSVLVVPEWEAEVSQEVRVCPGRGYILRVTAYKEGYGEGCVTIHEIENNTDELKFSNCVEEEIYPNNTVTCNDYTVNQEEYGGAYTSRNRGYNEAPSVPADYASVYEEKSYTDGRRENPCEFNRGYRDYTPLPVGYVTKELEYFPETDKVWIEIGETEGTFIVDSVQLLLMEE

SEQ ID NO: 416 - protein, 1156 aa, Bacillus thuringiensis
MDNNPNINECIPYNCLSNPEVEVLGGERIETGYTPIDISLSLTQFLLSEFVPGAGFVLGLVDIIWGIFGPSQWDAFLVQIEQLINQRIEEFARNQAISRLEGLSNLYQIYAESFREWEADPTNPALREEMRIQFNDMNSALTTAIPLFAVQNYQVPLLSVYVQAANLHLSVLRDVSVFGQRWGFDAATINSRYNDLTRLIGNYTDHAVRWYNTGLERVWGPDSRDWIRYNQFRRELTLTVLDIVSLFPNYDSRTYPIRTVSQLTREIYTNPVLENFDGSFRGSAQGIEGSIRSPHLMDILNSITIYTDAHRGEYYWSGHQIMASPVGFSGPEFTFPLYGTMGNAAPQQRIVAQLGQGVYRTLSSTLYRRPFNIGINNQQLSVLDGTEFAYGTSSNLPSAVYRKSGTVDSLDEIPPQNNNVPPRQGFSHRLSHVSMFRSGFSNSSVSIIRAPMFSWIHRSAEFNNIIPSSQITQIPLTKSTNLGSGTSVVKGPGFTGGDILRRTSPGQISTLRVNITAPLSQRYRVRIRYASTTNLQFHTSIDGRPINQGNFSATMSSGSNLQSGSFRTVGFTTPFNFSNGSSVFTLSAHVFNSGNEVYIDRIEFVPAEVTFEAEYDLERAQKAVNELFTSSNQIGLKTDVTDYHIDQVSNLVECLSDEFCLDEKKELSEKVKHAKRLSDERNLLQDPNFRGINRQLDRGWRGSTDITIQGGDDVFKENYVTLLGTFDECYPTYLYQKIDESKLKAYTRYQLRGYIEDSQDLEIYLIRYNAKHETVNVPGTGSLWPLSAPSPIGKCAHHSHHFSLDIDVGCTDLNEDLGVWVIFKIKTQDGHERLGNLEFLEGRAPLVGEALARVKRAEKKWRDKREKLEWETNIVYKEAKESVDALFVNSQYDRLQADTNIAMIHAADKRVHSIREAYLPELSVIPGVNAAIFEELEGRIFTAFSLYDARNVIKNGDFNNGLSCWNVKGHVDVEEQNNHRSVLVVPEWEAEVSQEVRVCPGRGYILRVTAYKEGYGEGCVTIHEIENNTDELKFSNCVEEEVYPNNTVTCNDYTATQEEYEGTYTSRNRGYDGAYESNSSVPADYASAYEEKAYTDGRRDNPCESNRGYGDYTPLPAGYVTKELEYFPETDKVWIEIGETEGTFIVDSVELLLMEE

SEQ ID NO: 417 - protein, 1181 aa, Bacillus thuringiensis
MDNNPNINECIPYNCLSNPEVEVLGGERIETGYTPIDISLSLTQFLLSEFVPGAGFVLGLVDIIWGIFGPSQWDAFLVQIEQLINQRIEEFARNQAISRLEGLSNLYQIYAESFREWEADPTNPALREEMRIQFNDMNSALTTAIPLFAVQNYQVPLLSVYVQAANLHLSVLRDVSVFGQRWGFDAATINSRYNDLTRLIGNYTDHAVRWYNTGLERVWGPDSRDWIRYNQFRRELTLTVLDIVSLFPNYDSRTYPIRTVSQLTREIYTNPVLENFDGSFRGSAQGIEGSIRSPHLMDILNSITIYTDAHRGEYYWSGHQIMASPVGFSGPEFTFPLYGTMGNAAPQQRIVAQLGQGVYRTLSSTLYRRPFNIGINNQQLSVLDGTEFAYGTSSNLPSAVYKKSGTVDSLDEIPPQNNNVPPRQGFSHRLSHVSMFRSGFSNSSVSIIRAPMFSWIHRSAEFNNIIPSSQITQIPLTKSTNLGSGTSVVKGPGFTGGDILRRTSPGQISTLRVNITAPLSQRYRVGIRYASTTNLQFHTSIDGRPINQGNFSATMSSGSNLQSGSFRTVGFTTPFNFSNGSSVFTLSAHVFNSGNEVYIDRIEFVPAEVTFEAEYDLERAQKAVNELFTSSNQIGLKTDVTDYHIDQVSNLVECLSDEFCLDEKQELSEKVKHAKRLSDERNLLQDPNFRGINRQLDRGWRGSTDITIQGGDDVFKENCVTLLGTFDECYPTYLYQKIDESKLKAYTRYQLRGYIEDSQDLEIYLIRYNAKHETVNVPGTGSLWPLSAQSPIGKCGEPNRCAPHLEWNPDLDCSCRDGEKCAHHSHHFSLDIDVGCTDLNEDLGVWVIFKIKTQDGHARLGNLEFLEEKPLVGEALARVKRAEKKWRDKREKLEWETNIVYKEAKESVDALFVNSQYDQLQADTNIAMIHAADKRVHSIREAYLPELSVIPGVNAAIFEELEGRIFTAFSLYDARNVIKNGDFNNGLSCWNVKGHVDVEEQNNQRSVLVVPEWEAEVSQEVRVCPGRGYILRVTAYKEGYGEGCVTIHEIENNTDELKFSNCVEEEVYPNNTVTCNDYTATQEEYEGTYTSRNRGYDGAYESNSSVPADYASAYEEKAYTDGRRDNPCESNRGYGDYTPLPAGYVTKELEYFPETDKVWIEIGETEGTFIVDSVELLLMEE

SEQ ID NO: 418 - protein, 859 aa, Bacillus thuringiensis
MDILNSITIYTDAHRGEYYWSGHQIMASPVGFSGPEFTFPLYGTMGNAAPQQRIVAQLGQGVYRTLSSTLYRRPFNIGINNQQLSVLDGTEFAYGTSSNLPSAVYRKSGTVDSLDEIPPQNNNVPPRQGFSHRLSHVSMFRSGFSNSSVSIIRAPMFSWIHRSAEFNNIIPSSQITQIPLTKSTNLGSGTSVVKGPGFTGGDILRRTSPGQISTLRVNITAPLSQRYRVRIRYASTTNLQFHTSIDGRPINQGNFSATMSSGSNLQSGSFRTVGFTTPFNFSNGSSVFTLSAHVFNSGNEVYIDRIEFVPAEVTFEAEYDLERAQKAVNELFTSSNQIGLKTDVTDYHIDQVSNLVECLSDEFCLDEKKELSEKVKHAKRLSDERNLLQDPNFRGINRQLDRGWRGSTDITIQGGDDVFKENYVTLLGTFDECYPTYLYQKIDESKLKAYTRYQLRGYIEDSQDLEIYLIRYNAKHETVNVPGTGSLWPLSAPSPIGKCAHHSHHFSLDIDVGCTDLNEDLGVWVIFKIKTQDGHARLGNLEFLEEKPLVGEALARVKRAEKKWRDKREKLEWETNIVYKEAKESVDALFVNSQYDRLQADTNIAMIHAADKRVHSIREAYLPELSVIPGVNAAIFEELEGRIFTAFSLYDARNVIKNGDFNNGLSCWNVKGHVDVEEQNNHRSVLVVPEWEAEVSQEVRVCPGRGYILRVTAYKEGYGEGCVTIHEIENNTDELKFSNCVEEEVYPNNTVTCNDYTATQEEYEGTYTSRNRGYDGAYESNSSVPADYASAYEEKAYTDGRRDNPCESNRGYGDYTPLPAGYVTKELEYFPETDKVWIEIGETEGTFIVDSVELLLMEE

SEQ ID NO: 419 - protein, 1155 aa, Bacillus thuringiensis
MDNNPNINECIPYNCLSNPEVEVLGGERIETGYTPIDISLSLTQFLLSEFVPGAGFVLGLVDIIWGIFGPSQWDAFLVQIEQLINQRIEEFARNQAISRLEGLSNLYQIYAESFREWEADPTNPALREEMRIQFNDMNSALTTAIPLFAVQNYQVPLLSVYVQAANLHLSVLRDVSVFGQRWGFDAATINSRYNDLTRLIGNYTDHAVRWYNTGLERVWGPDSRDWIRYNQFRRELTLTVLDIVSLFPNYDSRTYPIRTVSQLTREIYTNPVLENFDGSFRGSAQGIEGSIRSPHLMDILNSITIYTDAHRGEYYWSGHQIMASPVGFSGPEFTFPLYGTMGNAAPQQRIVAQLGQGVYRTLSSTLYRRPFNIGINNQQLSVLDGTEFAYGTSSNLPSAVYRKSGTVDSLDEIPPQNNNVPPRQGFSHRLSHVSMFRSGFSNSSVSIIRAPMFSWIHRSAEFNNIIPSSQITQIPLTKSTNLGSGTSVVKGPGFTGGDILRRTSPGQISTLRVNITAPLSQRYRVRIRYASTTNLQFHTSIDGRPINQGNFSATMSSGSNLQSGSFRTVGFTTPFNFSNGSSVFTLSAHVFNSGNEVYIDRIEFVPAEVTFEAEYDLERAQKAVNELFTSSNQIGLKTDVTDYHIDQVSNLVECLSDEFCLDEKKELSEKVKHAKRLSDERNLLQDPNFRGINRQLDRGWRGSTDITIQGGDDVFKENYVTLLGTFDECYPTYLYQKIDESKLKAYTRYQLRGYIEDSQDLEIYLIRYNAKHETVNVPGTGSLWPLSAPSPIGKCAHHSHHFSLDIDVGCTDLNEDLGVWVIFKIKTQDGHARLGNLEFLEEKPLVGEALARVKRAEKKWRDKREKLEWETNIVYKEAKESVDALFVNSQYDRLQADTNIAMIHAADKRVHSIREAYLPELSVIPGVNAAIFEELEGRIFTAFSLYDARNVIKNGDFNNGLSCWNVKGHVDVEEQNNHRSVLVVPEWEAEVSQEVRVCPGRGYILRVTAYKEGYGEGCVTIHEIENNTDELKFSNCVEEEVYPNNTVTCNDYTATQEEYEGTYTSRNRGYDGAYESNSSVPADYASAYEEKAYTDGRRDNPCESNRGYGDYTPLPAGYVTKELEYFPETDKVWIEIGETEGTFIVDSVELLLMEE

SEQ ID NO: 420 - protein, 1155 aa, Bacillus thuringiensis
MDNNPNINECIPYNCLSNPEVEVLGGERIETGYTPIDISLSLTQFLLSEFVPGAGFVLGLVDIIWGIFGPSQWDAFLVQIEQLINQRIEEFARNQAISRLEGLSNLYQIYAESFREWEADPTNPALREEMRIQFNDMNSALTTAIPLFAVQNYQVPLLSVYVQAANLHLSVLRDVSVFGQRWGFDAATINSRYNDLTRLIGNYTDHAVRWYNTGLERVWGPDSRDWIRYNQFRRELTLTVLDIVSLFPNYDSRTYPIRTVSQLTREIYTNPVLENFDGSFRGSAQGIEGSIRSPHLMDILNSITIYTDAHRGEYYWSGHRIMASPVGFSGPEFTFPLYGTMGNAAPQQRIVAQLGQGVYRTLSSTLYRRPFNIGINNQQLSVLDGTEFAYGTSSNLPSAVYRKSGTVDSLDEIPPQNNNVPPRQGFSHRLSHVSMFRSGFSNSSVSIIRAPMFSWIHRSAEFNNIIPSSQITQIPLTKSTNLGSGTSVVKGPGFTGGDILRRTSPGQISTLRVNITAPLSQRYRVRIRYASTTNLQFHTSIDGRPINQGNFSATMSSGSNLQSGSFRTVGFTTPFNSSNGSSVFTLSAHVFNSGNEVYIDRIEFVPAEVTFEAEYDLERAQKAVNELFTSSNQIGLKTDVTDYHIDQVSNLVECLSDEFCLDEKKELSEKVKHAKRLSDERNLLQDPNFRGINRQLDRGWRGSTDITIQGGDDVFKENYVTLLGTFDECYPTYLYQKIDESKLKAYTRYQLRGYIEDSQDLEIYLIRYNAKRETVNVPGTGSLWPLSAPSPIGKCAHHSHHFSLDIDVGCTDLNEDLGVWVIFKIKTQDGHARLGNLEFLEEKPLVGEALARVKRAEKKWRDKREKLEWETNIVYKEAKESVDALFVNSQYGRLQADTNIAMIHAADKRVHSIREAYLPELSVIPGVNAAIFEELEGRIFTAFSLYDARNVIKNGDFNNGLSCWNVKGHVDVEEQNNHRSVLVVPEWEAEVSQEVRVCPGRGYILRVTAYKEGYGEGCVTIHEIENNTDELKFSNCVEEEVYPNNTVTCNDYTATQEEYEGTYTSRNRGYDGAYESNSSVPADYASAYEEKAYTDGRRDNPCESNRGYGDYTPLPAGYVTKELEYFPETDKVWIEIGETEGTFIVDSVELLLMEE

SEQ ID NO: 421 - protein, 1181 aa, Bacillus thuringiensis
MDNNPNINECIPYNCLSNPEVEVLGGERIETGYTPIDISLSLTQFLLSEFVPGAGFVLGLVDIIWGIFGPSQWDAFLVQIEQLINQRIEEFARNQAISRLEGLSNLYQIYAESFREWEADPTNPALREEMRIQFNDMNSALTTAIPLFAVQNYQVPLLSVYVQAANLHLSVLRDVSVFGQRWGFDAATINSRYNDLTRLIGNYTDHAVRWYNTGLERVWGPDSRDWIRYNQFRRELTLTVLDIVSLFPNYDSRTYPIRTVSQLTREIYTNPVLENFDGSFRGSAQGIEGSIRSPHLMDILNSITIYTDAHRGEYYWSGHQIMASPVGFSGPEFTFPLYGTMGNAAPQQRIVAQLGQGVYRTLSSTLYRRPFNIGINNQQLSVLDGTEFAYGTSSNLPSAVYRKSGTVDSLDEIPPQNNNVPPRQGFSHRLSHVSMFRSGLSNSSVSIIRAPMFSWIHRSAEFNNIIPSSQITQIPLTKSTNLGSGTSVVKGPGFTGGDILRRTSPGQISTLRVNITAPLSQRYRVRIRYASTTNLQFHTSIDGRPINQGNFSATMSSGSNLQSGSFRTVGFTTPFNFSNGSSVFTLSAHVFNSGNEVYIDRIEFVPAEVTFEAEYDLERAQKAVNELFTSSNQIGLKTDVTDYHIDQVSNLVECLSDEFCLDEKKELSEKVKHAKRLSDERNLLQDPNFRGINRQLDRGWRGSTDITIQGGDDVFKENYVTLLGTFDECYPTYLYQKIDESKLKAYTRYQLRGYIEDSQDLEIYLIRYNAKHETVNVPGTGSLWPLSAQSPIGKCGEPNRCAPHLEWNPDLDCSCRDGEKCAHHSHHFSLDIDVGCTDLNEDLGVWVIFKIKTQDGHARLGNLEFLEEKPLVGEALARVKRAEKKWRDKREKLEWETNIVYKEAKESVDALFVNSRYDRLQADTNIAMIHAADKRVHSIREAYLPELSVIPGVNAAIFEELEGRIFTAFSLYDARNVIKNGDFNNGLSCWNVKGHVDVEEQNNHRSVLVVPEWEAEVSQEVRVCPGRGYILRVTAYKEGYGEGCVTIHEIENSTDELKFSNCVEEEVYPNNTVTCNDYTATQEEYEGTYTSRNRGYDGAYESNSSVPADYASAYEEKAYTDGRRDNPCESNRGYGDYTPLPAGYVTKELEYFPETDKVWIEIGETEGTFIVDSVDLLLMEE

SEQ ID NO: 422 - protein, 1155 aa, Bacillus thuringiensis
MDNNPNINECIPYNCLSNPEVEVLGGERIETGYTPIDISLSLTQFLLSEFVPGAGFVLGLVDIIWGIFGPSQWDAFLVQIEQLINQRIEEFARNQAISRLEGLSNLYQIYAESFREWEADPTNPALREEMRIQFNDMNSALTTAIPLFAVQNYQVPLLSVYVQAANLHLSVLRDVSVFGQRWGFDAATINSRYNDLTRLIGNYTDHAVRWYNTGLERVWGPDSRDWIRYNQFRRELTLTVLDIVSLFPNYDSRTYPIRTVSQLTREIYTNPVLENFDGSFRGSAQGIEGSIRSPHLMDILNSITIYTDAHRGEYYWSGHQIMASPVGFSGPEFTFPLYGNMGNAAPQQRIVAQLGQGVYRTLSSTLYRRPFNIGINNQQLSVLDGTEFAYGTSSNLPSAVYRKSGTVDSLDEIPPQNNNVPPRQGFSHRLSHVSMFRSGFSNSSVSIIRAPMFSWIHRSAEFNNIIPSSQITQIPLTKSTNLGSGTSVVKGPGFTGGDILRRTSPGQISTLRVNITAPLSQRYRVRIRYASTTNLQFHTSIDGRPINQGNFSATMSSGSNLQSGSFRTVGFTTPFNFSNGSSVFTLSAHVFNSGNEVYIDRIEFVPAEVTFEAEYDLERAQKAVNELFTSSNQIGLKTDVTDYHIDQVSNLVECLSDEFCLDEKKELSEKVKHAKRLSDERNLLQDPNFRGINRQLDRGWRGSTDITIQGGDDVFKENYVTLLGTFDECYPTYLYQKIDESKLKAYTRYQLRGYIEDSQDLEIYLIRYNAKHETVNVPGTGSLWPLSAPSPIGKCAHHSHHFSLDIDVGCTDLNEDLGVWVIFKIKTQDGHARLGNLEFLEEKPLVGEALARVKRAEKKWRDKREKLEWETNIVYKEAKESVDALFVNSQYDRLQADTNIAMIHAADKRVHSIREAYLPELSVIPGVNAAIFEELEGRIFTAFSLYDARNVIKNGDFNNGLSCWNVKGHVDVEEQNNHRSVLVVPEWEAEVSQEVRVCPGRGYILRVTAYKEGYGEGCVTIHEIENNTDELKFSNCVEEEVYPNNTVTCNDYTATQEEYEGTYTSRNRGYDGAYESNSSVPADYASAYEEKAYTDGRRDNPCESNRGYGDYTPLPAGYVTKELEYFPETDKVWIEIGETEGTFIVDSVELLLMEE

SEQ ID NO: 423 - protein, 793 aa, Bacillus thuringiensis
MQCVPYNCLSNPEVEVLGGERIETGYTPIDISLSLTQFLLSEFVPGAGFVLGLVDIIWGIFGPSQWDAFLVQIEQLINQRIEEFARNQAISRLEGLSNLYQIYAESFRAWEADPTNPALRVEMRIQFNDMNSALTTAIPLFAVQNYQVPLLSVYVQAANLHLSVLRDVSVFGQRWGFDATTINSRYNDLTRLIGNYTDYAVRWYNTGLERVWGPDSRDWIRYNQFRRELTLTVLDIVSLFPNYDSRTYPIRTVSQLTREIYTNPVLEDFNGSFRGSAQGIEQSIRSPHLMDILNSITIYTDAHRGYYYWSGHQIMASPVGFSGPEFTFPLYGTMGNAAPQQRIVAQLGQGVYRTLSSTFYRSPFNIGINNQQLSVLDGTEFAYGTSSNLPSAVYRKSGTVDSLDEIPPQNNNVPPRQGFSHRLSHVSMFRSGFSNSSVSIIRAPMFSWIHRSAEFNNIIPSSQITQIPLTKSTNLGSGTSVVKGPGFTGGDILRRTSPGQISTLRVNITAPLSQRYRVRIRYASTTNLQFHTSIDGRPINQGNFSATMSSGSNLQSGSFRTAGFTTPFNFSNGSSVFTLSAHVFNSGNEVYIDRIEFVPAEVTFEAEYDLERAQKAVNALFTSSNQIGLKTDVTDYHIDQVSNLVECLSDEFCLDEKQELSEKVKHAKRLSDERNLLQDPNFRWINRQLDRGWRGSTDITIQGGDDVFKENYVTLPGTFDECYPTYLYQKIDESKLKAYTRYQLRGYIEDSQDLEIYLIRYNAKHETVNVPGTGSLWPLSAQSPIGRCGEPNR

SEQ ID NO: 424 - protein, 373 aa, Bacillus thuringiensis
RDMTVIVLDIVSLFPNYDSRTYPIRTVSQLTREIYTNPVLENFDGSFRGSAQGIEGSIRSPHLMDILNSITIYTDAHRGEYYWSGHQIMASPVGFSGPEFTFPLYGTMGNAAPQQRIVAQLGQGVYRTLSSTLYRRPFNIGINNQQLSVLDGTEFAYGTSSNLPSAVYRKSGTVDSLDEIPPQNNNVPPRQGFSHRLSHVSMFRSGFSNSSVSIIRAPMFSWIHRSAEFNNIIPSSQITQIPLTKSTNLGSGTSVVKGPGFTGGDILRRTSPGQISTLRVNITAPLSQRYRVRIRYASTTNLQFHTSIDGRPINQGNFSATMSSGSNLQSGSFRTVGFTTPFNFSNGSSVFTLSAHVFNSGNEVYIDKIEFIP

SEQ ID NO: 425 - protein, 1177 aa, Bacillus thuringiensis
MDNNPNINECIPYNCLSNPEVEVLGGERIETGYTPIDISLSLTQFLLSEFVPGAGFVLGLVDIIWGIFGPSQWDAFLVQIEQLINQRIEEFARNQAISRLEGLSNLYQIYAESFREWEADPTNPALREEMRIQFNDMNSALTTAIPLLAVQNYQVPLLSVYVQAANLHLSVLRDVSVFGQRWGFDAATINSRYNDLTRLIGNYTDHAVRWYNTGLERVWGPDSRDWVRYNQFRRELTLTVLDIVALFPNYDSRRYPIRTVSQLTREIYTNPVLENFDGSFRGSAQGIERSIRSPHLMDILNSITIYTDAHRGYYYWSGHQIMASPVGFSGPEFTFPLYGTMGNAAPQQRIVAQLGQGVYRTLSSTFYRRSFNIGINNQQLSVLDGTEFAYGTSSNLPSAVYRKSGTVDSLDEIPPQNNNVPPRQGFSHRLSHVSMFRSGSSSSVSIIRAPMFSWIHRSAEFNNIIASDSITQIPAVKGNFLFNGSVISGPGFTGGDLVRLNSSGNNIQNRGYIEVPIHFPSTSTRYRVRVRYASVTPIHLYVNWGNSSIFSNTVPATATSLDNLQSSDFGYFESANAFTSSLGNIVGVRNFSGTAGVIIDRFEFIPVTATLEAEYNLERAQKAVNALFTSTNQLGLKTNVTDYHIDQVSNLVTCLSDEFCLDEKRELSEKVKHAKRLSDERNLLQDSNFKDINRQPERGWGGSTGITIQGGDDVFKENYVTLSGTFDECYPTYLYQKIDESKLKAFTRYQLRGYIEDSQDLEIYLIRYNAKHETVNVSGTGSLWPLSAQSPIGKCGEPNRFAPHLEWNPDLDCSCRDGEKCAHHSHHFSLDIDVGCTDLNEDLGVWVIFKIKTQDGHARLGNLEFLGEKPLVGEALARVKRAEKKWRDKREKLEWETNIVYKEAKESVDALFVNSQYDQLQADTNIAMIHAADKRVHSIREAYLPELSVIPGVNAAIFEELEGRIFTAFSLYDARNVIKNGDFNNGLSCWNVKGHVDVEEQNNHRSVLVVPEWEAEVPQEVRVCPGRGYILRVTAYKEGYGEGCVTIHEIENNTDELKFSNCVEEEVYPNNTVTCNDYTVNQEEYGGAYTSRNRGYNEAPSVPADYASVYEEKSYTDGRRENPCEFNRGYRDYTPLPVGYVTKELEYFPETDKVWIEIGETEGTFIVDSVQLLLMEE

SEQ ID NO: 426 - protein, 609 aa, Bacillus thuringiensis
MDNNPNINECIPYNCLSNPEVEVLGGERIETGYTPIDISLSLTQFLLSEFVPGAGFVLGLVDIIWGIFGPSQWDAFLVQIEQLINQRIEEFARNQAISRLEGLSNLYQIYAESFREWEADPTNPALREEMRIQFNDMNSALTTAIPLLAVQNYQVPLLSVYVQAANLHLSVLRDVSVFGQRWGFDAATINSRYNDLTRLIGNYTDHAVRWYNTGLERVWGPDSRDWVRYNQFRRELTLTVLDIVALFPNYDSRRYPIRTVSQLTREIYTNPVLENFDGSFRGSAQGIERSIRSPHLMDILNSITIYTDAHRGYYYWSGHQIMASPVGFSGPEFTFPLYGTMGNAAPQQRIVAQLGQGVYRTLSSTFYRRPFNIGINNQQLSVLDGTEFAYGTSSNLPSAIYRKSGTVDSLDEIPPQNNNVPPRQGFSHRLSHVSMFRSGSSSSVSIIRAPMFSWIHRSAEFNNIIASDSITQIPAVKGNFLFNGSVISGPGFTGGDLVRLNSSGNNIQNRGYIEVPIHFPSTSTRYRVRVRYASVTPIHLYVNWGNSSIFSNTVPATATSLDNLQSSDFGYFESANAFTSSLGNIVGVRNFSGTAGVIIDRFEFIPVTA

SEQ ID NO: 427 - protein, 609 aa, Bacillus thuringiensis
MDNNPNINECIPYNCLSNPEVEVLGGERIETGYTPIDISLSLTQFLLSEFVPGAGFVLGLVDIIWGIFGPSQWDAFLVQIEQLINQRIEEFARNQAISRLEGLSNLYQIYAESFREWEADPTNPALREEMRIQFNDMNSALTTAIPLLAVQNYQVPLLSVYVQAANLHLSVLRDVSVFGQRWGFDAATINSRYNDLTRLIGNYTDHAVRWYNTGLERVWGPDSRDWVRYNQFRRELTLTVLDIVALFPNYDSRRYPIRTVSQLTREIYTNPVLENFDGSFRGSAQGIERSIRSPHLMDILNSITIYTDAHRGYYYWSGHQIMASPVGFSGPEFTFPLYGTMGNAAPQQRIVAQLGQGVYRTLSSTFYRRPFNIGINNQQLSVLDGTEFAYGTSSNLPSAVYRKSGTVDSLDEIPPQNNNVPPRQGFSHRLSHVSMFRSGSSSSVSIIRAPMFSWIHRSAEFNNIIASDSITQIPAVKGNVLFNGSVISGPGFTGGDLVRLNSSGNNIQNRGYIEVPIHFPSTSTRYRVRVRYASVTPIHLYVNWGNSSIFSNTVPATATSLDNLQSSDFGYFESANAFTSSLGNIVGVRNFSGTAGVIIDRFEFIPVTA

SEQ ID NO: 428 - protein, 1171 aa, Bacillus thuringiensis
MEIVNNQNQCVPYNCLNNPENEILDIERSNSTVATNIALEISRLLASATPIGGILLGLFDAIWGSIGPSQWDLFLEQIELLIDQKIEEFARNQAISRLEGISSLYGIYTEAFREWEADPTNPALKEEMRTQFNDMNSILVTAIPLFSVQNYQVPFLSVYVQAANLHLSVLRDVSVFGQAWGFDIATINSRYNDLTRLIPIYTDYAVRWYNTGLDRLPRTGGLRNWARFNQFRRELTISVLDIISFFRNYDSRLYPIPTSSQLTREVYTDPVINITDYRVGPSFENIENSAIRSPHLMDFLNNLTIDTDLIRGVHYWAGHRVTSHFTGSSQVITTPQYGITANAEPRRTIAPSTFPGLNLFYRTLSNPFFRRSENITPTLGINVVQGVGFIQPNNAEVLYRSRGTVDSLNELPIDGENSLVGYSHRLSHVTLTRSLYNTNITSLPTFVWTHHSATNTNTINPDIITQIPLVKGFRLGGGTSVIKGPGFTGGDILRRNTIGEFVSLQVNINSPITQRYRLRFRYASSRDARITVAIGGQIRVDMTLEKTMEIGESLTSRTFSYTNFSNPFSFRANPDIIRIAEELPIRGGELYIDKIELILADATFEEEYDLERAQKAVNALFTSTNQLGLKTDVTDYHIDQVSNLVECLSDEFCLDEKRELSEKVKHAKRLSDERNLLQDPNFRGINRQPDRGWRGSTDITIQGGDDVFKENYVTLPGTFDECYPTYLYQKIDESKLKAYTRYELRGYIEDSQDLEIYLIRYNAKHETVNVPGTGSLWPLSAQSPIGKCGEPNRCAPHLEWNPNLDCSCRDGEKCAHHSHHFSLDIDVGCTDLNEDLGVWVIFKIKTQDGYARLGNLEFLEEKPLLGEALARVKRAEKKWRDKCEKLEWETNIVYKEAKESVDALFVNSQYDRLQADTNIAMIHAADKRVHSIREAYLPELSVIPGVNAAIFEELEGRIFTAFSLYDARNVIKNGDFNNGLSCWNVKGHVDVEEQNNHRSVLVVPEWEAEVSQEVRVCPGRGYILRVTAYKEGYGEGCVTIHEIEDNTDELKFSNCVEEEVYPNNTVTCNNYTATQEEHEGTYTSRNRGYDEAYESNSSVHASVYEEKSYTDRRRENPCESNRGYGDYTPLPAGYVTKELEYFPETDKVWIEIGETEGTFIVDSVELLLMEE

SEQ ID NO: 429 - protein, 1168 aa, Bacillus thuringiensis
MKNNIQNQCVPYNCLSNPEVEILSEERSTGRLPLDISLSLTRFLLSEFVPGVGVAFGLFDLIWGFITPSEWSLFLLQIEQLIEQRIETLERNRAITTLRGLADSYEVYLEALREWEENPNNAQLREDVRIRFANTDDALITAINNFTLTSFEIPLLSVYVQAANLHLSLLRDAVSFGQGWGLDIATVNNHYNRLINLIHRYTEHCLDTYNQGLENLRGTNTRQWSRFNQFRRELTLTVLDIVALFPNYDARAYPIQTSSQLTREIYTSSVIEDSPVSANIPNGFNRAEFGVRPPHLMDFMNSLFVTAETVRSQTVWGGHLVSSRNTAGNPINFPIYGVFNPGGAIWIADEDPRPFYRTLSDPVFVRGGFGDPHYVLGLRGVGFQQTGTNHTRTFRNSGTIDSLDEIPPQDNSGAPWNDYSHVLNHVTFVRWPGEIAGSDSWRAPMFSWTHRSADRTNIINPNIITQIPAVKAHNLHSGSTVVRGPGFTGGDLLRRTNTGTFADIRVNITGPLSQRYRVRIRYASTTDLQFFTRINGTSVNQGNFQRTMNRGDNLESGNFRTAGFSTPFSFSNAQSTFTLGTQAFSNQEVYIDRIEFVPAEVTFEAESDLERAQKAVNALFTSTSQLGLKTNVTGYHIDQVSNLVACLSDEFCLDEKRELSEKVKHAKRLSDKRNLLQDPNFRGINRQPDHGWRGSTDITIQGGDDVFKENYVTLPGTFDECYPTYLYQKIDESKLKAYTRYQLRGYIEDSQDLEIYLIRYNSKHEIVNVPGTGSLWPLSVENQIGPCGEPNRCAPHLEWNPDLHCSCRDGEKCVHHSHHFSLDIDVGCTDLNEDLGVWLIFKIKTQDGHARLGNLEFLEEEPLLGEALGRVKRAEKKWRDKREKLQLETNIVYKEAKESVDALFVNSQYDRLQADTNIAMIHAADKRVHRIREAYLPELSVIPGVNAAIFEELEGRIFTAYSLYDARNVIKNGNFNNGLLCWNVKGHVDVEEQNNHRSVLVVPEWEAEVSQEVRVCPGRGYILRVTAYKEGYGEGCVTIHEVDNNTDELKFSNCEKEQVYPGNTVACNDYNKNHGANACSSRNRGYDESYESNSSIPADYAPVYEEEAYTDGQRGNPCEFNRGHTPLPAGYVTAELEYFPETDTVWVEIGETEGTFIVDSVELLLMEE

SEQ ID NO: 430 - protein, 719 aa, Bacillus thuringiensis
MKLKNPDKHQSFSSNAKVDKISTDSLKNETDIELQNINHEDCLKMSEYENVEPFVSASTIQTGIGIAGKILGTLGVPFAGQVASLYSFILGELWPKGKNQWEIFMEHVEEIINQKISTYARNKALTDLKGLGDALAVYHDSLESWVGNRNNTRARSVVKSQYIALELMFVQKLPSFAVSGEEVPLLPIYAQAANLHLLLLRDASIFGKEWGLSSSEISTFYNRQVERAGDYSDHCVKWYSTGLNNLRGTNAESWVRYNQFRRDMTLMVLDLVALFPSYDTQIYPIKTTAQLTREVYTDAIGTVHPHPSFTSTTWYNNNAPSFSAIEAAVVRNPHLLDFLEQVTIYSLLSRWSNTQYMNMWGGHKLEFRTIGGTLNISTQGSTNTSINPVTLPFTSRDVYRTESLAGLNLFSTQPDNGVPRVDFHWKFVTHPIASDNFYYPGYAGIGTQLQDSENELPPEATGQPSYESYSHRLSHIGLISASHVKALVYSWTHRSADRTNTIEPNSITQIPLVKAFNLSSGAAVVRGPGFTGGDILRRTNTGTFGDIRVNINPPFAQRYRVRIRYASTTDLQFHTSINGKAINQGNFSATMNRGEDLDYKTFRTVGFTTPFSFLDVQSTFTIGAWNFSSGNEVYIDRIEFVPVEVTYEAEYDFEKAQEKVTALFTSTNPRGLKTDVKDYHIDQVSNLVESLSDEFYLDEKRELFEIVKYAKQLHIERNM

SEQ ID NO: 431 - protein, 722 aa, Bacillus thuringiensis
MKLKNQDKHQSFSSNAKVDKISTDSLKNETDIELQNINHEDCLKMSEYENVEPFVSASTIQTGIGIAGKILGTLGVPFAGQVASLYSFILGELWPKGKNQWEIFMEHVEEIINQKISTYARNKALTDLKGLGDALAVYHDSLESWVGNRNNTRARSVVKSQYIALELMFVQKLPSFAVSGEEVPLLPIYAQAANLHLLLLRDASIFGKEWGLSSSEISTFYNRQVERAGDYPDHCVKWYSTGLNNLRGTNAESWVRYNQFRRDMTLMVLDLVALLPSYDTQMYPIKTTAQLTREVYTDAIGTVHPHPSFTSTTWYNNNAPSFSAIEAAVVRNPHLLDFLEQVTIYSLLSRWSNTQYMNMWGGHKLEFRTIGGTLNISTQGSTNTSINPVTLPFTSRDVYRTESLAGLNLFLTQPVNGVPRVDFHWKFVTHPIASDNFYYPGYAGIGTQLQDSENELPPEATGQPNYESYSHRLSHIGLISASHVKALVYSWTHRSADRTNTIEPNSITQIPLVKAFNLSSGAAVVRGPGFTGGDILRRTNTGTFGDIRVNINPPFAQRYRVRIRYASTTDLQFHTSINGKAINQGNFSATMNRGEDLDYKTFRTVGFTTPFSFLDVQSTFTIGAWNFSSGNEVYIDRIEFVPVEVTYEAEYDFEKAQEKVTALFTSTNPRGLKTDVKDYHIDQVSNLVESLSDEFYLDEKRELFEIVKYAKQLHIERNMVDA

SEQ ID NO: 432 - protein, 717 aa, Bacillus thuringiensis
MKLKNQDKHQSFSSNAKVDKISTDSLKNETDIELQNINHEDCLKMSEYENVEPFVSASTIQTGIGIAGKILGTLGVPFAGQVASLYSFILGEPWPKGKNQWEIFMEHVEEIINQKISTYARNKALTDLKGLGDALAVYHDSLESWVGNRNNTRARSVVKSQYIALELMFVQRLPSFAVSGEEVPLLPIYAQAANLHLLLLRDASIFGKEWRLSSSEISTFYNRQVERAGDYSDHCVKWYSTGLNNLRGTNAESWVRYNQFRRDMTLMVLDLVALFPSYDTQMYPIKTTAQLTREVYTDAIGTVHPHPSFTSTTWYNNNAPSFSAIEAAVVRSPHLLDFLEQVTIYSLLSRWSNTQYMNMWGGHKLEFRTIGGTLNISTQGSTNTSINPVTLPFTSRDVYRTESLAGLNLFLTQPVNGVPRVDFHWKFVTHPIASDNFYYPGYAGIGTQLQDSENELPPEATGQPNYESYSHRLSHIGLISASHVKALVYSWTHRSADRTNTIEPNSITQIPLVKAFNLSSGAAVVRGPGFTGGDILRRTNTGTFGYIRVNINPPFAQRYRVRIRYASTTDLQFHTSINGKAINQGNFSATMNRGEDLDYKTFRTVGFTTPFSFLDVQSTFTIGAWNFSSGNEVYIDRIEFVPVEVTYEAEYDSEKAQEKVTALFTSTNPRGLKTDVKDYHIDQVSNLVESLSDEFYLDEKRELFEIVKYAKQLHIER

SEQ ID NO: 433 - protein, 722 aa, Bacillus thuringiensis
MKLKNQDKHQSFSSNAKVDKISTDSLKNETDIELQNINHEDCLKMSEYENVEPFVSASTIQTGIGIAGKILGTLGVPFAGQVASLYSFILGELWPKGKSQWEIFMEHVEEIINQKISTYARNKALTDLKGLGDALAVYHDSLESWVGNRNNTRARSVVKSQYIALELMFVQKLPSFAVSGEEVPLLPIYAQAANLHLLLLRDASIFGKEWGLSSSEISTFYNHQVERAGDYSDHCVKWYSTGLNNLRGTNAESWVRYNQFRRDMTLMVLDLVALFPSYDIQMYPIKTTAQLTREVYTDAIGTVHPHPSFTSTTWYNNNAPSFSAIEAAVVRNPHLLDFLEQVTIYSLLSRWSNTQYMNMWGGHKLEFRTIGGTLNISTQGSTNTSINPVTLPFTSRDVYRTESLAGLNLFLTQPVNGVPRVDFHWKFVTHPIASDNFYYPGYAGIGTQLQDSENELPPEATGQPNYESYSHRLSHIGLISASHVKALVYSWTHRSADRTNTIEPNSITQIPLVKAFNLSSGAAVVRGPGFTGGDILRRTNTGTFGDIRVNINPPFAQRYRVRIRYASTTDLQFHTSINGKAINQGNFSATMNRGEDLDYKTFRTVGFTTPFSFLDVQSTFTIGAWNFSSGNEVYIDRIEFVPVEVTYEAEYDFEKAQEKVTALFTSTNPRGLKTDVKDYHIDQVSNLVESLSDEFYLDEKRELFEIVKYAKQLHIERNMVDA

SEQ ID NO: 434 - protein, 719 aa, Bacillus thuringiensis
MKLKNPDKHQSLSSNAKVDKIATDSLKNETDIELKNMNNEDYLRMSEHESIDPFVSASTIQTGIGIAGKILGTLGVPFAGQIASLYSFILGELWPKGKSQWEIFMEHVEEIINQKILTYARNKALSDLRGLGDALAVYHESLESWVENRNNTRARSVVKNQYIALELMFVQKLPSFAVSGGEVPLLPIYAQAANLHLLLLRDASIFGKEWGLSASEISTFYNRQVERTRDYSDHCIKWYNTGLNNLRGTNAKSWVRYNQFRKDMTLMVLDLVALFPSYDTLVYPIKTTSQLTREVYTDAIGTVHPNQAFASTTWYNNNAPSFSAIEAAVIRSPHLLDFLEKVTIYSLLSRWSNTQYMNMWGGHRLESRPIGGALNTSTQGSTNTSINPVTLQFTSRDVYRTESWAGLNLFLTQPVNGVPRVDFHWKFPTLPIASDNFYYLGYAGVGTQLQDSENELPPETTGQPNYESYSHRLSHIGLISASHVKALVYSWTHRSADRTNTIEPNSITQIPLVKAFNLSSGAAVVRGPGFTGGDILRRTNTGTFGDIRVNINPPFAQRYRVRIRYASTTDLQFHTSINGKAINQGNFSATMNRGEDLDYKTFRTVGFTTPFSFSDVQSTFTIGAWNFSSGNEVYIDRIEFVPVEVTYEAEYDFEKAQEKVTALFTSTNPRGLKTDVKDYHIDQVSNLVESLSDEFYLDEKRELFEIVKYAKQIHIERNM

SEQ ID NO: 435 - protein, 719 aa, Bacillus thuringiensis
MKLKNPDKHQTLSSNAKVDKIATDSLKNETDIELKNMNNEDYLRMSEHESIDPFVSASTIQTGIGIAGKILGTLGVPFPGQIASLYSFILGELWPKGKSQWEIFMEHVEAIINRKISTYARNKALTDLKGLGDALAVYHESLESWVGNRNNTRARSVVKNQYIALELMFVQKLPSFAVSGEEVPLLPIYAQAANLHLLLLRDASIFEKNGGLSASEISTFYNRQVERTRDYSYHCVKWNNTGLNNLRATNGQSWVRYNQFRKDIELMVLDLVRVFPSYDTLVYPIKTTSQLTREVYTDAIGTVDPNQALRSTTWYNNNAPSFSAIEAAVIRSPHLLDFLEKVTIYSLLSRWSNTQYMNMWGGHRLESRPIGGALNTSTQGSTNTSINPVTLQFTSRDFYRTESWAGLNLFLTQPVIGVPRVDFHWKFPTLPIASDNFYYLGYAGVGTQLQDSENELPPETTGQPNYESYSHRLSHIGLISASHVKALVYSWTHRSADRTNTIEPNSITQIPLVKAFNLSSGAAVVRGPGFTGGHILRRTKSGTFGHIRVNINPPFAQRYRVRMSYASTTDLQFHTSINGKAINQGNFSATMNRGEDLDYKTFRTVGFTTPFSFSDVQSTFTIGAWNFSSGNEVYIGRIEFVPVEVTYEAEYDFEKAQEKVTALFTSTNPRGLKTDVKDYHIDQVSNLVESLSDELYLDEKRELFEIVKYAKQIHIERNM

SEQ ID NO: 436 - protein, 381 aa, Bacillus thuringiensis
RDVIVIVLDLVALFPSYDTQMYPIKTTAQLTREVYTDAIGTVHPHPSFTSTTWYNNNAPSFSAIEAAVVRNPHLLDFLEQVTIYSLLSRWSNTQYMNMWGGHKLEFRTIGGTLNISTQGSTNTSINPVTLPFTSRDVYRTESLAGLNLFLTQPVNGVPRVDFHWKFVTHPIASDNFYYPGYAGIGTQLQDSENELPPEATGQPNYESYSHRLSHIGLISASHVKALVYSWTHRSADRTNTIEPNSITQIPLVKAFNLSSGAAVVRGPGFTGGDILRRTNTGTFGDIRVNINPPFAQRYRVRIRYASTTDLQFHTSINGKAINQGNFSATMNRGEDLDYKTFRTVGFTTPFSFLDVQSTFTIGAWNFSSGNEVYIDKIEFIP

SEQ ID NO: 437 - protein, 1167 aa, Bacillus thuringiensis
MEINNQKQCIPYNCLSNPEEVLLDGERILPDIDPLEVSLSLLQFLLNNFVPGGGFISGLVDKIWGALRPSEWDLFLAQIERLIDQRIEATVRAKAITELEGLGRNYQIYAEAFKEWESDPDNEAAKSRVIDRFRILDGLIEANIPSFRIIGFEVPLLSVYVQAANLHLALLRDSVIFGERWGLTTKNVNDIYNRQIREIHEYSNHCVDTYNTELERLGFRSIAQWRIYNQFRRELTLTVLDIVALFPNYDSRLYPIQTFSQLTREIVTSPVSEFYYGVINSGNIIGTLTEQQIRRPHLMDFFNSMIMYTSDNRREHYWSGLEMTAYFTGFAGAQVSFPLVGTRGESAPPLTVRSVNDGIYRILSAPFYSAPFLGTIVLGSRGEKFDFALNNISPPPSTIYRHPGTVDSLVSIPPQDNSVPPHRGSSHRLSHVTMRASSPIFHWTHRSATTTNTINPNAIIQIPLVKAFNLHSGATVVRGPGFTGGDILRRTNTGTFADMRVNITGPLSQRYRVRIRYASTTDLQFFTRINGTSVNQGNFQRTMNRGDNLESGNFRTAGFSTPFSFSNAQSTFTLGTQAFSNQEVYIDRIEFVPAEVTFEAESDLERAQKAVNALFTSTNQLGLKTDVTDYQIDQVSNLVECLSDEFCLDEKRELSEKVKHAKRLSDKRNLLQDPNFTSINRQLDRGWRGSTDITIQGGNDVFKENYVTLPGTFDECYPTYLYQKIDESKLKAYTRYELRGYIEDSQDLEVYLIRYNAKHETVNVPGTGSLWPLSVESPIGRCGEPNRCVPHIEWNPDLDCSCRDGEKCAHHSHHFSLDIDVGCTDLNEDLGVWVIFKIKTQDGHARLGNLEFLEEKPLLGEALARVKRAEKKWRDKREQLQFETNIVYKEAKESVDALFVDSHYNRLQADTNITMIHAADKRVHRIREAYLPELSVIPGVNADIFEELEGLIFTAFSLYDARNIIKNGDFNNGLSCWNVKGHVDIQQNDHRSVLVVPEWESEVSQEVRVCPGRGYILRVTAYKEGYGEGCVTIHEIEDNTDELKFSNCIEEEVYPTDTGNDYTAHQGTTGCADACNSRNVGYEDGYEINTTASVNYKPTYEEEMYTDVRRDNHCEYDRGYGNHTPLPAGYVTKELEYFPETDTVWIEIGETEGTFIVDSVELLLMEE

SEQ ID NO: 438 - protein, 1170 aa, Bacillus thuringiensis
MEINNQNQCIPYNCLSNPEEVLLDGERILPDIDPLEVSMSLLQFLLNNFVPGGGFISGLFDKIWGALRPSDWELFLAQIEQLIDQRIEATVRAKAIAELEGLGRSFQLYVEAFKEWEETPDNTAARSRVTERFRIIDAQIEANIPSFRIPGFEVPLLSVYAQAANLHLALLRDSVIFGERWGLTTTNVNDIYNRQVKRIHEYSDHCVDTYKTELERLGFTSRAQWKIYNQFRRELTLTVLDIVAVFPNYDGKLYPIQTKSELTREIYTSPVSEYYYGAINNYNQNGIQTERQIRQPHLMDFFNTMTMYTSYNRREYYWSGLEMTAYFTGFAGPQVSFPLAGTRGDAAPPFNVRSVNDGIYRILSAPFYSAPFLGTSVLGSRGEEFMFALNNISPPPSARYRNPGTVDSLVSIPPQDNSVPPHRGSSHRLSHVTMRNSSPIFHWTHRSATTTNRINSDVITQIPMVKAYNLHAGATVVRGPGFTGGDILRRTSNGMVVTLRVDASAVRNQRYRIRFRYAATSNFYFVVRRGNLGVNGREIMKTMSTGEELKSASFVLGEFITPFNFFENQVPLQIEIQSLSPGGEVYLDKIEFIPADTTFEAEYDLERAQKAVNALFTSTNQRGLKTDVTDYHIDQVSNLVECLSDEFCLDEKRELSEKVKHAKRLSDERNLLQDPNFTSINGQLDRGWRGSTDITIQGGNDVFKENYVTLPGTFDECYPTYLYQKIDESKLKAYTRYELRGYIEDSQDLEVYLIRYNAKHETLNVPGTDSLRTLSVESQNGRCGELNRCMPHIKWNPDVDCSCRDGEKCAHHSHHFSLDIDVGCTDLQEDLGVWVVFKIKTQEGYARLGNLEFIEEKPLVGEALSRVKRAEKKWRDKREKLELETKRVYTEAKEAVDALFVDSQYDRLQADTNIGMIHAADKLVHRICETYLPELPFIPGINAIIFEELENRISTAFFLYEARNVINNGDFNNGLTCWNVKGHVDVQQSHHRSVLVIPEWEAEVSQKVRVCPGRGYILRVTAYKEGYGEGCVTIHEIEDNTDELKFRNCEEEGDYSNDTGTCNDYPASQGAAGCADVCNSRNVGYKDAYETNTSASVNYKPTYEEETYTDVREDNHCEYDRGYVNYPPLPAGYVTKELEYFPETDTVWIEIGETEGKFIVDSVELLLMEE

SEQ ID NO: 439 - protein, 1168 aa, Bacillus thuringiensis
MEINNQNQCIPYNCLSNPEEVFLDGERILPDIDPLEVSLSLLQFLLNNFVPGGGFISGLLDKIWGALRPSDWELFLAQIEQLIDRRIERTVRAKAIAELEGLGRSYQLYGEAFKEWEKTPDNTAARSRVTERFRIIDAQIEANIPSFRVSGFEVPLLLVYTQAANLHLALLRDSVVFGERWGLTTTNVNDIYNRQVNRIGEYSKHCVDTYKTELERLGFRSIAQWRIYNQFRRELTLTVLDIVAVFPNYDSRLYPIRTISQLTREIYTSPVSEFYYGVINSNNIIGTLTEQQIRRPHLMDFFNSMIMYTSDNRREHYWSGLEMTATNTEGHQRSFPLAGTIGNSAPPVTVRNNGEGIYRILSEPFYSAPFLGTSVLGSRGEEFAFASNTTTSLPSTIYRNRGTVDSLVSIPPQDYSVPPHRGYSHLLSHVTMRNSSPIFHWTHRSATPRNTIDPDSITQIPAVKGAYIFNSPVITGPGHTGGDIIRFNPNTQNNIRIPFQSNAVQRYRIRMRYAAEADCILESGVNIVTGAGVTFRPIPIKATMTPGSPLTYYSFQYADLNINLTAPIRPNNFVSIRRSNQPGNLYIDRIEFIPIDPIREAEHDLERAQKAVNALFTSSNQLGLKTDVTDYHIDQVSNLVACLSDEFCLDEKRELSEKVKHAKRLSDERNLLQDQNFTGINRQVDRGWRGSTDITIQGGNDVFKENYVTLPGTFDECYPTYLYQKIDESKLKPYTRYELRGYIEDSQDLEVYLIRYNAKHETLNVPGTGSLWPLAAESSIGRCGEPNRCAPHIEWNPELDCSCRDGEKCAHHSHHFSLDIDVGCTDLNEDLGVWVIFKIKTQDGYARLGNLEFLEEKPLLGEALARVKRAEKKWRDKRDKLEWETNIVYKEAKESVDALFVDSQYNRLQTDTNIAMIHVADKRVHRIREAYLPELSVIPGVNAAIFEELEGLIFTAFSLYDARNVIKNGDFNHGLSCWNVKGHVDVEEQNNHRSVLVVPEWEAEVSQEVRVCPGRGYILRVTAYKEGYGEGCVTIHEIEDHTDELKFRNCEEEEVYPNNTVTCNDYPANQEEYRAAETSRNRGYGESYESNSSIPAEYAPIYEKAYTDGRKENSCESNRGYGNYTPLPAGYVTKELEYFPETDKVWIEIGETEGTFIVDSVELLLMEE

SEQ ID NO: 440 - protein, 725 aa, Bacillus thuringiensis
  misc_feature (55)..(55): Xaa can be any naturally occurring amino acid
  misc_feature (76)..(76): Xaa can be any naturally occurring amino acid
  misc_feature (477)..(477): Xaa can be any naturally occurring amino acid
  misc_feature (600)..(600): Xaa can be any naturally occurring amino acid
  misc_feature (604)..(604): Xaa can be any naturally occurring amino acid
  misc_feature (619)..(619): Xaa can be any naturally occurring amino acid
  misc_feature (624)..(624): Xaa can be any naturally occurring amino acid
  misc_feature (637)..(637): Xaa can be any naturally occurring amino acid
  misc_feature (647)..(647): Xaa can be any naturally occurring amino acid
  misc_feature (653)..(653): Xaa can be any naturally occurring amino acid
  misc_feature (712)..(712): Xaa can be any naturally occurring amino acid
MCGFTPTRSREQVAEISLGLTRFLLENLFPGSTFGFGLIDIIWGIFGPDQWSMFXEQIEQLIDQRIETVERNRANXNINWVINSYDVYIEALKEWENNPDNSASQERVRNRFRTTDDALITGIPLLAIPNFEIATLSVYVQAANLHLSLLRDAVFFGERWGLTQINVDDLYRRLTNNIRTNSDHCARWYNEGLDNISGLSRSINFQREVTISVLDIVALFPNYDIRTYPISTTSQLTREIFTSPIVVPNDFSVAYEGVRRAPHLFEFLEKLVIYTGDRSGIRHWAGHEITSRRTDSYHGIIRYPLYGTAANAESPYTLALQPSGSIYRTLSEPIFSQTGGLSPHRRRVVEGVEFSIVNNNVNPSSFVYRRKGSLDSFTELPPEDESVPPYIGYSHQLCHVGFGRTNVIFEPSNFARVPVFSWTHRSATPTNTIDPDRITQIPSVKASSLRNSTVVSGPGFTGGDIVRMGAVHQIYAXDLSMNVRPSVALSRYLIRLRYACRGSSNIVIHGPSIRFVSLPSTMSNDEPLTYQSFRYASITTPITRPIYNMFNLSISRISGVQNLFIDRIEFIPVDANFEAERDLERAQKAVNALFTSTNQXGLKXDVTDYHIDQVSNLVXCLSDXFCLDEKRELSEKXKHAKRLSDEXNLLQDXNFTGINRQVDRGWRGSTDITIQGGNDVFKENYVTLPGTFDECYPTYLYQKIDESKLKPXTRYELRGYIEDSQ

SEQ ID NO: 441 - protein, 1170 aa, Bacillus thuringiensis; identical to SEQ ID NO: 438

SEQ ID NO: 442 - protein, 1167 aa, Bacillus thuringiensis
MTNPTILYPSYHNVLAHPIRLDSFFDPFVETFKDLKGAWEEFGKTGYMDPLKQHLQIAWDTSQNGTVDYLALTKASISLIGLIPGADAVVPFINMFVDFIFPKLFGRGSQQNAQAQFFELIIEKVKELVDEDFRNFTLNNLLNYLDGMQTALSHFQNDVQIAICQGEQPGLMLDQTPTACTPTTDHLISVRESFKDARTTIETALPHFKNPMLSTNDNTPDFNSDTVLLTLPMYTTGATLNLILHQGYIQFAERWKSVNYDESFINQTKVDLQRRIQDYSTTVSTTFEKFKPTLNPSNKESVNKYNRYVRSMTLQSLDIAATWPTLDNVNYPSNVDIQLDQTRLVFSDVAGPWEGNDNITSNIIDVLTPINTGIGFQESSDLRKFTYPRIELQSMQFHGQYVNSKSVEHCYSDGLKLNYKNKTITAGVSNIDESNQNNKHNYGPVINSPITDINVNSQNSQYLDLNSVMVNGGQKVTGCSPLSSNGNSNNAALPNQKINVIYSVQSNDKPEKHADTYRKWGYMSSHIPYDLVPENVIGDIDPDTKQPSLLLKGFPAEKGYGDSIAYVSEPLNGANAVKLTSYQVLQMEVTNQTTQKYRIRIRYATGGDTAASIWFHIIGPSGNDLTNEGHNFSSVSSRNKMFVQGNNGKYVLNILTDSIELPSGQQTILIQNTNSQDLFLDRIEFISLPSTSTPTSTNFVEPESLEKIINQVNQLFSSSSQTELAHTVSDYKIDQVVLKVNALSDDVFGVEKKALRKLVNQAKQLSKARNVLVGGNFEKGHEWALSREATMVANHELFKGDHLLLPPPTLYPSYAYQKIDESKLKSNTRYTVSGFIAQSEHLEVVVSRYGKEVHDMLDIPYEEALPISSDESPNCCKPAACQCSSCDGSQSDSHFFSYSIDVGSLQSDVNLGIEFGLRIAKPNGFAKISNLEIKEDRPLTEKEIKKVQRKEQKWKKAFNQEQAEVATTLQPTLDQINALYQNEDWNGSVHPASDYQHLSAVVVPTLPKQRHWFMEGREGEHVVLTQQFQQALDRAFQQIEEQNLIHNGNLANGLTDWTVTGDAQLTIFDEDPVLELAHWDASISQTIEIMDFEGRHRIQTACTWKRQRNSYRSTWRKRLETMTFNTTSFTTQEQTFYFEGDTVDVHVQSENNTFLIDSVELIEIIEE

SEQ ID NO: 443 - protein, 1167 aa, Bacillus thuringiensis
MTNPTILYPSYHNVLAHPIRLDSFFDPFVETFKDLKGAWEEFGKTGYMDPLKQHLQIAWDTSQNGTVDYLALTKASISLIGLIPGADAVVPFINMFVDFIFPKLFGRGSQQNAQAQFFELIIEKVKELVDEDFRNFTLNNLLNYLDGMQTALSHFQNDVQIAICQGEQPGLMLDQTPTACTPTTDHLISVRESFKDARTTIETALPHFKNPMLSTNDNTPDFNSDTVLLTLPMYTTAATLNLILHQGYIQFAERWKSVNYDESFINQTKVDLQRRIQDYSTTVSTTFEKFKPTLNPSNKESVNKYNRYVRSMTLQSLDIAATWPTLDNVNYPSNVDIQLDQTRLVFSDVAGPWEGNDNITSNIIDVLTPINTGIGFQESSDLRKFTYPRIELQSMQFHGQYVNSKSVEHCYSDGLKLNYKNKTITAGVSNIDESNQNNKHNYGPVINSPITDINVNSQNSQYLDLNSVMVNGGQKVAGCSPLSSNGNSNNAALPNQKINVIYSVQSNDKPEKHADTYRKWGYMSSHIPYDLVPENVIGDIDPDTKQPSLLLKGFPAEKGYGDSIAYVSEPLNGANAVKLTSYQVLKMEVTNQTTQKYRIRIRYATGGDTAASIWFHIIGPSGNDLTNEGHNFSSVSSRNKMFVQGNNGKYVLNILTDSIELPSGQQTILIQNTNSQDLFLDRIEFISLPSTSTPTSTNFVEPESLEKIINQVNQLFSSSSQTELAHTVSDYKIDQVVLKVNALSDDVFGVEKKALRKLVNQAKQLSKARNVLVGGNFEKGHEWALSREATMVANHELFKGDHLLLPPPTLYPSYAYQKIDESKLKSNTRYTVSGFIAQSEHLEVVVSRYGKEVHDMLDIPYEEALPISSDESPNCCKPAACQCSSCDGSQSDSHFFSYSIDVGSLQSDVNLGIEFGLRIAKPNGFAKISNLEIKEDRPLTEKEIKKVQRKEQKWKKAFNQEQAEVATTLQPTLDQINALYQNEDWNGSVHPHVTYQHLSAVVVPTLPKQRHWFMEDREGEHVVLTQQFQQALDRAFQQIEEQNLIHNGNFANGLTDWTVTGDAQLTIFDEDPVLELAHWDASISQTIEIMDFEEDTEYKLRVRGKGKGTVTVQHGEEELETMTFNTTSFTTQEQTFYFEGDTVDVHVQSENNTFLIDSVELIEIIEE

SEQ ID NO: 444 - protein, 633 aa, Bacillus thuringiensis
MNSVLNSRRTTICDAYNVVAHDPFSFEHKSLDTIQKEWMEWKRTDHSLYVAPVVGTVSSFLLKKVGSLIGKRILSELWGIIFPSGSTNLMQDILRETEQFLNQRLNTDTLARVNAELIGLQANIREFNQQVDNFLNPTQNPVPLSITSSVNTMQQLFLNRLPQFQIQGYQLLLLPLFAQAANMHLSFIRDVILNADEWGISAATLRTYRDYLRNYTRDYSNYCINTYQTAFRGLNTRLHDMLEFRTYMFLNVFEYVSIWSLFKYQSLMVSSGANLYASGSGPQQTQSFTAQNWPFLYSLFQVNSNYILSGISGTRLSITFPNIGGLPGSTTTHSLNSARVNYSGGVSSGLIGATNLNHNFNCSTVLPPLSTPFVRSWLDSGTDREGVATSTNWQTESFQTTLSLRCGAFSARGNSNYFPDYFIRNISGVPLVIRNEDLTRPLHYNQIRNIESPSGTPGGARAYLVSVHNRKNNIYAANENGTMIHLAPEDYTGFTISPIHATQVNNQTRTFISEKFGNQGDSLRFEQSNTTARYTLRGNGNSYNLYLRVSSIGNSTIRVTINGRVYTVSNVNTTTNNDGVNDNGARFSDINIGNIVASDNTNVTLDINVTLNSGTPFDLMNIMFVPTNLSPLY

SEQ ID NO: 445 - protein, 633 aa, Bacillus thuringiensis
MNSVLNSGRTTICDAYNVAAHDPFSFQHKSLDTVQKEWTEWKKNNHSLYLDPIVGTVASFLLKKVGSLVGKRILSELRNLIFPSGSTNLMQDILRETEKFLNQRLNTDTLARVNAELTGLQANVEEFNRQVDNFLNPNRNAVPLSITSSVNTMQQLFLNRLPQFQMQGYQLLLLPLFAQAANLHLSFIRDVILNADEWGISAATLRTYRDYLKNYTRDYSNYCINTYQSAFKGLNTRLHDMLEFRTYMFLNVFEYVSFWSVFKYQSLLVSSGANLNARGRGPQQAQSFTSPGWAFLNSLFQVNSNYVFNGFRGARLFNSFPNIIGLPGFTTTHPLLAAKVNYKGRISSGDIGASPVNQNFNCSKFLPPLLTPFVRSWLDSGSDREGVATVTNWQTESFETTLGLRSGAFTARGNSNYFPDYFIRNISGVPLVVRNEDLRRPLHYNEIRNIASPSGTPGGARAYMVSVHNRKNNIHAVHENGSMIHLAPNDYTGFTISPIHATQVNNQTRTFISEKFGNQGDSLRFEQNNTTARYTLRGNGNSYNLYLRVSSIGNSTIRVTINGRVYTATNVNTTTNNDGVNDNGARFSDINIGNVVARSNSDVSLDINVSLNSRTLIDLMNIMLVPTNISPLY

SEQ ID NO: 446 - protein, 633 aa, Bacillus thuringiensis
MNTVLNSGRTTICDAYNVAAHDPFSFQHKSLDTVQKEWTEWKKNNHSLYLDPIVGTVASFLLKKVGSLVGKRILSELRNLIFPSGSTNLMQDILRETEKFLNQRLNTDTLARVNAELTGLQANVEEFNRQVDNFLNPNRNAVPLSITSSVNTMQQLFLNRLPQFQMQGYQLLLLPLFAQAANLHLSFIRDVILNADEWGISAATLRTYRDYLKNYTRDYSNYCINTYQSAFKGLNTRLHDMLEFRTYMFLNVFEYVSIWSLFKYQSLLVSSGANLYASGSGPQQTQSFTSQDWPFLYSLFQVNSNYVLNGFSGARLSNTFPNIVGLPGSTTTHALLAARVNYSGGISSGDIGASPFNQNFNCSTFLPPLLTPFVRSWLDSGSDREGVATVTNWQTESFETTLGLRSGAFTARGNSNYFPDYFIRNISGVPLVVRNEDLRRPLHYNEIRNIASPSGTPGGARAYMVSVHNRKNNIHAVHENGSMIHLAPNDYTGFTISPIHATQVNNQTRTFISEKFGNQGDSLRFEQNNTTARYTLRGNGNSYNLYLRVSSIGNSTIRVTINGRVYTATNVNTTTNNDGVNDNGARFSDINIGNVVASSNSDVPLDINVTLNSGTQFDLMNIMLVPTNLPPLY

SEQ ID NO: 447 - protein, 633 aa, Bacillus thuringiensis
MNSVLNSGRTTICDAYNVAAHDPFSFQHKSLDTVQKEWTEWKKNNHSLYLDPIVGTVASFLLKKVGSLVGKRILSELRNLIFPSGSTNLMQDILRETEKFLNQRLNTDTLARVNAELTGLQANVEEFNRQVDNFLNPNRNAVPLSITSSVNTMQQLFLNRLPQFQMQGYQLLLLPLFAQAASLHLSFIRDVILNADEWGISAATLRTYRDYLKNYTRDYSNYCINTYQSAFKGLNTRLHDMLEFRTYMFLNVFEYVSIWSLFKYQSLLVSSGANLYASGSGPQQTQSFTSQDWPFLYSLFQVNSNYVLNGFSGARLSNTFPNIVGLPGSTTTHALLAARVNYSGGISSGDIGASPFNQNFNCSTFLPPLLTPFVRSWLDSGSDREGVATVTNWQTESFETTLGLRSGAFTARGNSNYFPDYFIRNISGVPLVVRNEDLRRPLHYNEIRNIASPSGTPGGARAYMVSVHNRKNNIHAVHENGSMIHLAPNDYTGFTISPIHATQVNNQTRTFISEKFGNQGDSLRFEQNNTTARYTLRGNGNSYNLYLRVSSIGNSTIRVTINGRVYTATNVNTTTNNDGVNDNGARFSDINIGNVVASSNSDVPLDINVTLNSGTQFDLMNIMLVPTNLPPLY

SEQ ID NO: 448 - protein, 633 aa, Bacillus thuringiensis
MNSVLNIGRTTICDAYNVAAHDPFSFQHKSLDTVQKEWTEWKKNNHSLYLDPIVGTVASFLLKKVGSLVGKRILSELRNLIFPSGSTNLMQDILRETEKFLNQRLNTDTLARVNAELTGLQANVEEFNRQVDNFLNPNRNAVPLSITSSVNTMQQLFLNRLPQFQMQGYQLLLLPLFAQAANLHLSFIRDVILNADEWGISAATLRTYRDYLKNYTRDYSNYCINTYQSAFKGLNTRLHDMLEFRTYMFLNVFEYVSIWSLFKYQSLLVSPGANLYASGSGPQQTQSFTSQDWPFLYSLFQVNSNYVLNGFSGARLSNTFPNIVGLPGSTTTHALLAARVNYSGGISSGDIGASPFNQNFNCSTFLPPLLTPFVRSWLDSGSDREGVATVTNWQTESFETTLGLRSGAFTARGNSNYFPDYFIRNISGVPLVVRNEDLRRPLHYNEIRNIASPSGTPGGARAYMVSVHNRKNNIHAVHENGSMIHLAPNDYTGFTISPIHATQVNNQTRTFISEKFGNQGDSLRFEQNNTTARYTLRGNGNSYNLYLRVSSIGNSTIRVTINGRVYTATNVNTTTNNDGVNDNGARFSDINIGNVVASSNSDVPLDINVTLNSGTQFDLMNIMLVPTNIPPLY

SEQ ID NO: 449 - protein, 633 aa, Bacillus thuringiensis
MNSVLNTGRTTICDAYNVAAHDPFSFQHKSLDTVQKEWTEWKKNNHSLYLDPIVGTVASFLLKKVGSLVGKRILSELRNLIFPSGSTNLMQDILRETEKFLNQRLNTDTLARVNAELTGLQANVEEFNRQVDNFLNPNRNAVPLSITSSVNTMQQLFLNRLPQFQMQGYQLLLLPLFAQAANLHLSFIRDVILNADEWGISAATLRTYRDYLKNYTRDYSNYCINTYQSAFKGLNTRLHDMLEFRTYMFLNVFEYVSIWSLFKYQSLLVSSGANLYASGSGPQQTQSFTSQDWPFLYSLFQVNSNYVLNGFSGARLSNTFPNIVGLPGSTTTHALLAARVNYSGGISSGDIGASPFNQNFNCSTFLPPLLTPFVRSWLDSGSDREGVATVTNWQTESFETTLGLRSGAFTARGNSNYFPDYFIRNISGVPLVVRNEDLRRPLHYNEIRNIASPSGTPGGARAYMVSVHNRKNNIHAVHENGSMIHLAPNDYTGFTISPIHATQVNNQTRTFISEKFGNQGDSLRFEQNNTTARYTLRGNGNSYNLYLRVSSIGNSTIRVTINGRVYTATNVNTTTNNDGVNDNGARFSDINIGNVVASSNSDVPLDINVTLNSGTQFDLMNIMLVPTNISPLY

SEQ ID NO: 450 - protein, 633 aa, Bacillus thuringiensis
MNNVLNSRRTTICDAYNVAAHDPFSFQHKSLDTVQKEWTEWKKNNHSLYLDPIVGTVASFLLKKVGSLVGKRILSELRNLIFPSGSTNLMQDILRETEKFLNQRLNTDTLARVNAELTGLQANVEEFNRQVDNFLNPNRNAVPLSITSSVNTMQQLFLNRLPQFQMQGYQLLLLPLFAQAANLHLSFIRDVILNADEWGISAATLRTYRDYLKNYTRDYSNYCINTYQSAFKGLNTRLHDMLEFRTYMFLNVFEYVSIWSLFKYQSLLVSSGANLYASGSGPQQTQSFTSQDWPFLYSLFQVNSNYVLNGFSGARLSNTFPNIVGLPGSTTTHALLAARVNYSGGISSGDIGASPFNQNFNCSTFLPPLLTPFVRSWLDSGSDREGVATVTNWQTESFETTLGLRSGAFTARGNSNYFPDYFIRNISGVPLVVRNEDLRRPLHYNEIRNIASPSGTPGGARAYMVSVHNRKNNIHAVHENGSMIHLAPNDYTGFTISPIHATQVNNQTRTFISEKFGNQGDSLRFEQNNTTARYTLRGNGNSYNLYLRVSSIGNSTIRVTINGRVYTATNVNTTTNNDGVNDNGARFSDINIGNVVASSNSDVPLDINVTLNSGTQFDLMNIMLVPTNLSPLY

SEQ ID NO: 451 - protein, 632 aa, Bacillus thuringiensis
MNTVLNSGRTTICDAYNVAAHDPFSFQHKSLDTVQKEWTEWKKNNHSLYLDPIVGTVASFLLKKVGSLVGKRILSELRNLIFPSGSTNLMQDILRETEKFLNQRLNTDTLARVNAELTGLQANVEEFNRQVDNFLNPNRNAVPLSITSSVNTMQQLFLNRLPQFQMQGYQLLLLPLFAQAANLHLSFIRDVILNADEWGISAATLRTYRDYLKNYTRDYSNYCINTYQSAFKGLNTRLHDMLEFRTYMFLNVFEYVSIWSLFKYQSLLVSSGANLYASGSGPQQTQSFTSQDWPFLYSLFQVNSNYVLNGFSGARLSNTFPNIVGLPGSTTTHALLAARVNYSGGISSGDIGASPFNQNFNCSTFLPPLLTPFVRSWLDSGSDREGVATVTNWQTESFETTLGLRSGAFTARGNSNYFPDYFIRNISGVPLVVRNEDLRRPLHYNEIRNIASPSGTPGGARAYMVSVHNRKNNIHAVHENGSMIHLAPNDYTGFTISPIHATQVNNQTRTFISEKFGNQGDSLRFEQNNTTARYTLRGNGNSYNLYLRVSSIGNSTIRVTINGRVYTATNVNTTTNNDGVNDNGARFSDINIGNVVASSNSDVPLDINVTLNSGTQFDLMNIMLVPTNLPPL

SEQ ID NO: 452 - protein, 633 aa, Bacillus thuringiensis; identical to SEQ ID NO: 446

SEQ ID NO: 453 - protein, 633 aa, Bacillus thuringiensis
MNSVLNNGRTTICDAYNVAAHDPFSFQHKSLDTVQKEWTEWKKNNHSLYLDPIVGTVASFLLKKVGSLVGKRILSELRNLIFPSGSTNLMQDILRETEKFLNQRLNTDTLARVNAELTGLQANVEEFNRQVDNFLNPNRNAVPLSITSSVNTMQQLFLNRLPQSQMQGYQLLLLPLFAQAANLHLSFIRDVILNADEWGISAATLRTYRDYLKNYTRDYSNYCINTYQSAFKGLNTRLHDMLEFRTYMFLNVFEYVSIWSLFKYQSLLVSSGANLYASGSGPQQTQSFTSQDWPFLYSLFQVNSNYVLNGFSGARLSNTFPNIVGLPGSTTTHALLAARVNYSGGISSGDIGASPFNQNFNCSTFLPPLLTPFVRSWLDSGSDREGVATVTNWQTESFETTLGLRSGAFTARGNSNYFPDYFIRNISGVPLVVRNEDLRRPLHYNEIRNIASPSGTPGGARAYMVSVHNRKNNIHAVHENGSMIHLAPNDYTGFTISPIHATQVNNQTRTFISEKFGNQGDSLRFEQNNTTARYTLRGNGNSYNLYLRVSSIGNSTIRVTINGRVYTATNVNTTTNNDGVNDNGARFSDINIGNVVASSNSDVPLDINVTLNSGTQFDLMNIMLVPTNIPPLY

SEQ ID NO: 454 - protein, 633 aa, Bacillus thuringiensis
MNNVLNSGRNITCHAHNVVAHDPFSFEHKSLNTIEKEWKEWKRTDHSLYVAPIVGTVGSFLLKKVGSLVGKRILSELQNLIFPSGSIDLMQEILRATEQFINQRLNADTLGRVNAELAGLQANVAEFNRQVDNFLNPNQNPVPLAIIDSVNTLQQLFLSRLPQFQIQGYQLLLLPLFAQAANLHLSFIRDVILNADEWGISAATVRTYRDHLRNFTRDYSNYCINTYQTAFRGLNTRLHDMLEFRTYMFLNVFEYVSIWSLFKYQSLMVSSGANLYASGSGPQQTQSFTAQNWPFLYSLFQVNSNYILSGISGTRLSITFPNIGGLPGSTTTHSLNSARVNYSGGVSSGLIGATNLNHNFNCSTVLPPLSTPFVRSWLDSGTDREGVATSTNWQTESFQTTLSLRCGAFSARGNSNYFPDYFIRNISGVPLVIRNEDLTRPLHYNQIRNIESPSGTPGGARAYLVSVHNRKNNIYAANEYGTMIHLAPEDYTGFTISPIHATQVNNQTRTFISEKFGNQGDSLRFEQSNTTARYTLRGNGNSYNLYLRASSIGNSTIRVTINGRAYTVSNVNTTTNNDGVNDNGARFSDINIGNIVASDNTNVTLDINVTLNSGTPFDLMNIMFVPTNLPPLY

SEQ ID NO: 455 - protein, 362 aa, Bacillus thuringiensis
MNKKSITHEEFIRQLKEYNLDNNLNYHDPAVLKKINELLPADQQYDLISPTQDWYQFKTLYPISKNGVIISSNLDDSSNVLVPELSENPYDPIPQSGKSTIQTAVRSPEALYIILTTNNSLSFGGGTNTMIATRIALLSVTRPELYQAITKVNYVYKSGQTAPRNAPVAYIELSPNNSYVQTLLNDSHMKRTSSYELVGSSIARRGIETKWSKSHTSGVSDTDSWSLAVSAGIDIEWDVGIPLTASAKEKLSLSITGTYGQSTTVSSQDTITQEYTFAKPGKDYKYDDYAYAVYQLKSNYQFIAGDAFNNLINSLSFGNQFSVHGDASYQYSTDTIFSTQTPDPTPTNEKSLIQVNFNPRFS

SEQ ID NO: 456 - protein, 609 aa, Bacillus thuringiensis
MGTWWPTDSASDTWGEMIGFAQELVGTALSEDLKIRTNQQIDSIRIALQAYYSSLEDWLNANKPLSGPLLNQVTEEFGNALRKSRDSIAYFKSDDSNVYTIILLPAYAQVANFHLALIHEGLKYATEWNLPRLQTFGYEEDLKHYTISYVNHCEYWYQKGLDILYPRNVIGMTQWMKRNFYRLNMTINVLDIISLFSLYDSKKYPNFFEDIYNAQKELISKFQLTRIVTTEPTLHQHKYLNDSSKKICQNESSCDPIDLDEYLTLPLMFQNWLRNINFQYLAPVISVGDEALYPFFVATQNINEYMNAEGNMIIGRQQGLWNFQFIIVHLFHLVYKKMTIFMVKWLSAYPLIDEDILNGVRTPYILQKIEFYNLNKSINSKQIRPISAGTTKSPLIDIYYGLPDVNGYNLDEPQFNFNAASHYFNSIQTCYYKENTSKNHYDIYQSYVFHWEHASVKRKDEVVSDRITIFPAIKSNPILSRGIQIISHQGHTGGNVIYFTPQSELHFKINFVSNRQKYKIRLRYVAFNPVVIQYHGSNSYASLSSITLPRTSSNQNVRDLRYEEFGYSDFEINMSSAGGLEDIKIISNNEFILDRIEFIPDTLFNYLSN

SEQ ID NO: 457 - protein, 837 aa, Bacillus thuringiensis
MKIYDIYPHYNVLSDAALITSYASDFRDSLKGLEEIWSKYATEGNRSAMTSYVSNIMQLYQTDSINYQALVKSAITLNLALTPLAPVSPFINMVIGFVRPFLFGSSKEVSMFDQIMDAVKKEMEHSFEQFTLNNLNDTINGLKTDLYDFTRLIDASTGVLQLPYESGEGCKPCKLGENSPCAPCYNDMIAINSKFQALTSSFNNALPHFKDPLANVIEKPNPGWNQEYITMCLPLYTLVATLELLTYQGYIQFAEKWRIPADSETSPITTTQIANMKANLRQRIQEHSNDIYTTFIKYLPKVNENATKGELNDYIRYHRVITLQCLDFVATWPFLDSRYYQSSGAATINFTRMTYLDIVGPVEDFYNDSKLDPSRDSGKLILSIKDINGKNDTNKISDVIAPLSLFYDNLELKSLKFNVYNSSWHCYINGYQGIYNSLSNDVSVSTNTNNLAKDLYLDFPLLNKLNMRSYAVGKASVDDSMVYVDDDSDVPSGNGHAIYGGCNGFYTGGPHSNNTLNYDNQIIQAIYEVTASNPNVYTYYYNADKTGYLATLSPIETTLSPIIGTDFQVINTVPAEQVISTSGTKFVEYITGSAVLELKPNQTAKYSILNQGLFQYKVRARVATTDSGSLSITMNNKTINLNIINTKNYTDPTTAFTNLKIQGKNGSYMVFPLSDAEHTTFDNVFNPNYGTVTMEVTNNSNTNIIIDRFEFIPYAPSKGTLLDTIPETIRTGGDSSILWKSTTGIGGQQVDLNIVIKDPSGIDVTTNYLLQYGSSYEFPLFSGQHSYPAVLNNEFTELGIDNCYGGNLGCNMNMPLKTIVPEGYTLTFSGNIYNNLK

SEQ ID NO: 458 - protein, 1220 aa, Bacillus thuringiensis
MAILNELYPSVPYNVLAYTPPSFLPDAGTQATPADLTAYEQLLKNLEKGINAGTYSKAIADVLKGIFIDDTINYQTYVNIGLSLITLAVPEIGIFTPFIGLFFAALNKHDAPPPPNAKDIFEAMKPAIQEMIDRTLTADEQTFLNGEISGLQNLAARYQSTMDDIQSHGGFNKVDSGLIKKFTDEVLSLNSFYTDRLPVFITDNTADRTLLGLPYYAILASMHLMLLRDIITKGPTWDSKINFTPDAIDSFKTDIKNNIKLYSKTIYDVFQKGLASYGTPSDLESFAKKKKYIEIMTTHCLDFARLFPTFDPDLYPTGSGDISLQKTRRILSPFIPIRTADGLTLNNTSIDTSNWPNYENGNGAFPNPKERILKQFKLYPSWRAGQYGGLLQPYLWAIEVQDSVETRLYGQLPAVDPQAGPNYVSIDSSNPIIQINMDTWKTPPQGASGWNTNLMRGSVSGLSFLQRDGTRLSAGMGGGFADTIYSLPATHYLSYLYGTPYQTSDNYSGHVGALVGVSTPQEATLPNIIGQPDEQGNVSTMGFPFEKASYGGTVVKEWLNGANAMKLSPGQSIGIPITNVTKHNYQVRCRYASNSDNPVFFNVDTGGANPIFQQINFASTVDSNMGVKEENGVYVVKSIKTVEIPAGSFYVHVTNQGSSDLFLDRIEFVPKIQFQFCDNNNLHCDCNNPVDTDCTFCCVCTSLTDCDCNNPRGIDCTLCCQVENQLPSFVTLTDLRNITSQVNGLFAPGTQNRLAQNISDHDIEEVVLKVDALSDEIFGTNKKALRKLVNQAKRLSRARNLLIGGSFENWDAWYKGRNVVTVSDHELFKSDHVLLPPPGLSPSYIFQKVEESKLKANTRYTVSGFIAHATDLEIVVSRYGQEIKKVVQVPYGEAFPLTSSGPVCCIPHSTSNGTLGNPHFFSYSIDVGALDVDTNPGIEFGLRIVNPTGMARVSNLEIREDRPLAANEIRQVQRVARNWRTEYEKERAEVTSLIQPVINRINGLYENENWNGSIRSDISYQNIDAIVLPTLPTLRHWFMSDRFSEQGDIMAKFQGALNRAYAQLEQSTLLHNGHFTKDAANWTIEGDAHQITLEDGRRVLRLPDWSSSVSQMIEIENFNPDKEYNLVFHGQGEGTVTLEHGEETKYIETHTHHFANFTTSQRQGLTFESNKVTVTISSEDGEFLVDNIALVEAPLPTDDQNSEGNTAFSTNSDTSMNNNQ

SEQ ID NO: 459 - protein, 1121 aa, Bacillus thuringiensis
MEGGNNQGFINIEGRLSLEQVLAVSAGVASYILSNLGPFGVFFSYIIGAFWPTAPSDTRVWEAFMELIEARIDQKIQESTRKDAIARLQGLGAASEVYQESLESWLENQNDARAMSVVRQQFVAFELDFVTAMPFFERSGDEILLLAVYAQAANLHLLLLRDASLYGADWGMEPYDIANYYNRQKERTATYSNHCMEWYKKGLDELWSAGGYGGDVWQDYNDFRREMTLSVLDFVALFPNYDTHLYPIEVKGELTREIYTPGINIDIDRGRLGKVTLENALVNSPRLFSWLKEIQLFTNINFNPRWKFLSATRIGYKLTGYRSVNFEPYEGFYFEGLFQSNFTLNDYQEIYIVDVTRFGSLYDTPTAITAMTFFKDDNTTFNYSSNTPSGEPMITSGFYLPGIDGSEEPTSNNFSHRLSTINTYNTTNQTFYHTFGWTHVSVDRNNTIVSNKITQIPFVKANTGNVVRGPGHTGGDLVVFKPAARPDIVLRVGNTRLQSYRVRVRYASNADISLELDTTYEKTNIHLQKTFNSSEAEDLTYDNFQYAEADNIVWLGQDLSQYIEFQNAITNDSTAIAYFERVEFLPVGATYEAEQDLETAKKVVNALFTNTKNALQMSVTDYEVTQAANLVECVSDELFPNEKRLLFDAVKEAKRLSGIRNLLQDSDFQEINGENGWVGSIEIEIREGDTLFKGYSLRLPSAREIYMEMFPTYLHQKIEESRLKPYTRYRLRGFVSSSQDLEIFSIRHETNRIVKNVSDDLLPNLSSYYTCGGVNRCSTQKYVYNRLEFQNSLSSGNRYSDAHSFSIPIDTGKIDLNDNTGIWIAFKLATTGGYATLGNLELVEEAPLIGDTLERVQREDQQWKSQMTRKREEAERKYMAAKQAIDRLYADYQDHQLNPNVEITDITATQHLVQSLPYVNNDVLQEIPGMNYTRFTELTNRLQQAWELYGLRNMIANGDFRNGLNDWDATSGVNIQQINHTSVLVISNWDAQISKQFTVQPNQKYVLRVTVRKEGSGDGYVTIRDGGNHTETLTFNTCDYERSNVYNEKVFQSNDYGTNNVYHTQTTNANRYTTNSLYNDGTGYVTKTVEFIPYTEQVWIEMSETEGVFYVESIEFILEEV

SEQ ID NO: 460 - protein, 1154 aa, Bacillus thuringiensis
MNRNNQNEYEIIDGTNCGCSSDEVVKYPLTDDPNAGLQNMNYKEYLQTYDGDYTGSLINPNLSINTRDVLQTGINIVGRVLGFLGVPFAGQLVTFYTFLLNQLWPTNNNAVWEAFMAQIEELIDQRISEQVVRNALDALTGIHDYYNEYLAALEEWLERPNGARANLAFQRFENLHQLFVSQMPSFGSGPGSERDAVALLTVYAQAANLHLLLLKDAEIYGARWGLNQGQINLYFNAQQDRTQIYTNHCVATYNRGLENLRGTNTESWYNYHQFRREMTLMAMDLVALFPYYNLRQYPNGANPQLTREIYTDPVVFNPPANQGLCRRWRNNPYMTFSELENTFIRPPHLFDRLNSLTINSHRFPISSNFMDYWAGHTLRRSYMNNSAVQEDSYGATTSTRVTINTGVNGTNRIESTAVDFRSGLLGVYGVHRASFVPGGLFNGTISPANAGCRNLHDTRDELPLEENNGSPSHRLSHVTFLSFLTDQAGSIRNSGAVPLYVWARQDIDLNNTITANRITQLPLVKASEIAAGTTVVRGPGFTGGDILRRTSAGTLGTIRVNVNSPLTQRYRVRFRYASTTDFNFFVIRGGTTVNNFTFPRTMNSGQESRYESYVTREFSTSFNFLQIQDTLRLTVQSFSSGQQVYVDRIEIIPVNPTREAEEDLEAAKKAVANLFTHTRDGLQVNVTDYQVDQAANLVSCLSDEQYSHDKKMLLEAVRAAKRLSRERNLLQDPDFNEINTIEENGWKASNGVTISEGGPFFKGRALQLASARENNPTYIYQKVDASVLKPYTRYRLDGFVASSQDLELDLIHQHKVHLVKNVPDNLVSDSYSDGSCSGINRCEEQHLVDMQLDAEHHPMDCCEAAETHEFSSYIDTGDLNPSVDQGIWVVLKVRTTDGYATLGNLELVEVGPLSGESLEREQKDNAKWNAELGRKRAETDRVYQAAKQAINHLFVDYQDQQLNPEIGLAEMNEASNLLESIPGVYSDTVLQIPGVNYEIYTELSNRLQQASYLFMSRNAVQNGDFNNGLDSWNATTDATVQQDGTMHFLVLSHWDAQVSQPLRVQPNCKYVLRVTARKVGGGDGYVTIQDGAHHQETLTFNACDYDVNGTYVNDNTYITKEVVFYPETKHMWIEVSESEGAFYIDSIEFIEIQE

SEQ ID NO: 461 - protein, 638 aa, Bacillus thuringiensis
EIIDGTNCGCSSDEVVKYPLTDDPNAGLQNMNYKEYLQTYDGDYTGSLINPNLSINTRDVLQTGINIVGRVLGFLGVPFAGQLVTFYTFLLNQLWPTNNNAVWEAFMAQIEELIDQRISEQVVRNALDALTGIHDYYNEYLAALEEWLERPNGARANLAFQRFENLHQLFVSQMPSFGSGPGSERDAVALLTVYAQAANLHLLLLKDAEIYGARWGLNQGQINLYFNAQQDRTQIYTNHCVATYNRGLENLRGTNTESWYNYHQFRREMTLMAMDLVALFPYYNLRQYPNGANPQLTREIYTDPVVFNPPANQGLCRRWRNNPYMTFSELENTFIRPPHLFDRLNSLTINSHRFPISSNFMDYWAGHTLRRSYMNNSAVQEDSYGATTSTRVTINTGVNGTNRIESTAVDFRSGLLGVYGVHRASFVPGGLFNGTISPANAGCRNLHDTRDELPLEENNGSPSHRLSHVTFLSFLTDQAGSIRNSGAVPLYVWARQDIDLNNTITANRITQLPLVKASEIAAGTTVVRGPGFTGGDILRRTSAGTLGTIRVNVNSPLTQRYRVRFRYASTTDFNFFVIRGGTTVNNFTFPRTMNSGQESRYESYVTREFSTSFNFLQIQDTLRLTVQSFSSGQQVYVD

SEQ ID NO: 462 - protein, 249 aa, Bacillus thuringiensis
MENLNHCPLEDIKVNPWKTPQSTARVITLRVEDPNEINNLLSINEIDNPNYILQAIMLANAFQNALVPTSTDFGDALRFSMAKGLEIANTITPMGAVVSYVDQNVTQTNNQVSVMINKVLEVLKTVLGVALSGSVIDQLTAAVTNTFTNLNTQKNEAWIFWGKETANQTNYTYNVLFAIQNAQTGGVMYCVPVGFEIKVSAVKEQVLFFTIQDSASYNVNIQSLKFAQPLVSSSQYPIADLTSAINGTL

SEQ ID NO: 463 - protein, 249 aa, Bacillus thuringiensis; identical to SEQ ID NO: 462

SEQ ID NO: 464 - protein, 249 aa, Bacillus thuringiensis
MENLNHCPLEDIKVNPWKTPQSTARVITLRVEDPNEINNLLSINEIDNPNYILQAIMLANAFQNALVPTSTDFGDALRFSMPKGLEIANTITPMGAVVSYVDQNVTQTNNQVSVMINKVLEVLKTVLGVALSGSVIDQLTAAVTNTFTNLNTQKNEAWIFWGKETANQTNYTYNVLFAIQNAQTGGVMYCVPVGFEIKVSAVKEQVLFFTIQDSASYNVNIQSLKFAQPLVSSSQYPIADLTSAINGTL

SEQ ID NO: 465 - protein, 250 aa, Bacillus thuringiensis
MENPNHCPLEDIQVNPWKTPQSKARVITLRIDDPNEINNLLSINEIENTNYLLQAIMLANAFQKALVPTSTEFAEDALQFSMTKGLEVANTISPPGAVVQYVDQNVSQTNNQVSAMINKVLDVLKSILGVALGQSVIEQLTSAVTNTFTNLNTQKNEAWIFWGRETSTQTNYTYNVLFAIQNGQTGGVMYCVPVGFEIKVSAVKERVLFLTIQDSASYNVNIQSLKFAQPLVSASEYPIADLTSAINGTL

SEQ ID NO: 466 - protein, 265 aa, Bacillus thuringiensis
MKESIYYNEENEIQISQGNCFPEELGHNPWRQPQSTARVIYLKVKDPIDTTQLLEITEIENPNYVLQAIQLAAAFQDALVPTETEFGEAIRFSMPKGLEVAKTIQPKGAVVAYTDQTLSQSNNQVSVMIDRVISVLKTVMGVALSGSIITQLTAAITDTFTNLNTQKDSAWVFWGKETSHQTNYTYNVMFAIQNETTGRVMMCVPIGFEIRVFTDKRTVLFLTTKDYANYSVNIQTLRFAQPLIDSRALSINDLSEALRSSKYLY

SEQ ID NO: 467 - protein, 525 aa, Bacillus thuringiensis
MAQSEFNQNLREQGQSRARVIILRVNNPGYNTNTLDIADIEDIIHLPQAIELANAFQSALVPTTSNFGEDTLRFDVERGLGIATHVYPRAINVNYVTRTLSQTNNQVQSMINKVIEELKSLLGINLANSVLQQLTTVITETFTNLYVQQQSAWLFWGRQTSSQTNYTYNIVFAIQNAQTGSFMKAIPIGFEISAYIARERLLFFNIQDYASYSVKIHAIQVMQPLIHESFQPLRGIFNIITSVNNRSAIQITEYYDENTHDYPVKLWDYNNIINQKWILVFNQTTRAYSIQNLIARYLVLTWDSTPGSNKVFASTNRWNDSQFWILESTADGSIFLTNMKDTQFVLEIENSSTTNGTNVIVNRKNNNAQQKFYLNKVNQEFQDGVYKIKTALNNSSVLQMSEDYFGYTSDYFVKLWTNNNNDINQKWIFEFDSTKSAYQIKSQRDPSLVLAWTWSVPTVKLPIPNNDDHLWFLQNAGSGTYYFVNMTDTRYVLEVASSSTTNGTILTINKRNGNLNQKFLLDMIN

SEQ ID NO: 468 - protein, 259 aa, Bacillus thuringiensis
MYTKNFSNSRMEVKGNNGCSAPIIRKPFKHIVLTVPSSDLDNFNTVFYVQPQYINQALHLANAFQGAIDPLNLNFNFEKALQIANGIPNSAIVKTLNQSVIQQTVEISVMVEQLKKIIQEVLGLVINSTSFWNSVEATIKGTFTNLDTQIDEAWIFWHSLSAHNTSYYYNILFSIQNEDTGAVMAVLPLAFEVSVDVEKQKVLFFTIKDSARYEVKMKALTLVQALHSSNAPIVDIFNVNNYNLYHSNHKIIQNLNLSN

SEQ ID NO: 469 - protein, 259 aa, Bacillus thuringiensis; identical to SEQ ID NO: 468

SEQ ID NO: 470 - protein, 259 aa, Bacillus thuringiensis
MYTKNFSNSRMEVKGNNGCSAPIIRKPFKHIVLTVPSSDLDNFNTVFYVQPQYINQALHLANAFQGAIDPLNLNFNFEKALQIANGIPNSAIVKTLNQSVIQQTVEISVMVEQLKKIIQEVLGLVINSTSFWNSVEATIKGTFTNLDTQIDEAWIFWHSLSAHNTSYYYNILFSIQNEDTGAVMAVLPLAFEVSVDVEKQKVLFFTIKDSARYEVKMKALTLVQALHSSDAPIVDIFNVNNYNLYHSNHKIIQNLNLSN

SEQ ID NO: 471 - protein, 259 aa, Bacillus thuringiensis; identical to SEQ ID NO: 468

SEQ ID NO: 472 - protein, 263 aa, Bacillus thuringiensis
MHLNNLNNFNNLENNGEYHCSGPIIKKPFRHIALTVPSSDITNFNEIFYVEPQYIAQAIRLTNTFQGAIDPLTLNFNFEKALQIANGLPNAGVTGTINQSVIHQTIEVSVMISQIKEIIRSVLGLVINSANFWNSVVSAITNTFTNLEPQVDENWIVWRNLSATQTSYFYKILFSIQNEDTGRFMAILPIAFEITVDVQKQQLLFITIKDSARYEVKMKALTVVQALDSYNAPIIDVFNVRNYSLHRPNHNILQNLNVNPIKS

SEQ ID NO: 473 - protein, 263 aa, Bacillus thuringiensis; identical to SEQ ID NO: 472

SEQ ID NO: 474 - protein, 263 aa, Bacillus thuringiensis; identical to SEQ ID NO: 472

SEQ ID NO: 475 - protein, 263 aa, Bacillus thuringiensis; identical to SEQ ID NO: 472

SEQ ID NO: 476 - protein, 246 aa, Bacillus thuringiensis
YHCSGPIIKKPFRHIALTVPSSDITNFNEIFYVEPQYIAQAIRLTNTFQGAIDPLTLNFNFEKALQIANGLPNAGVTGTINQSVIHQTIEVSVMISQIKEIIRSVLGLVINSANFWNSVVSAITNTFTNLEPQVDENWIVWRNLSATQTSYFYKILFSIQNEDTGRFMAILPIAFEITVDVQKQQLLFITIKDSARYEVKMKALTVVQALDSYNAPIIDVFNVRNYSLHRPNHNILQNLNVNPIKS

SEQ ID NO: 477 - protein, 156 aa, Bacillus thuringiensis
NTFQGAIDPLTLNFNFEKALQIANGLPNAGVTGTINQSVIHQTIEVSVMISQIKEIIRSVLGLVINSANFWNSVVSAITNTFTNLEPQVDENWVVWRNLSATQTSYFYKILFSIQNEDTGRFMAILPIAFEITVDVQKQQLLFITIKDSARYEVKM

SEQ ID NO: 478 - protein, 157 aa, Bacillus thuringiensis
NTFQGAIDPLTLNFNFEKALQIANGLPNAGVTGTINQSVIHQTIEVSVMISQIKEIIRSVLGLVINSANFWNSVVSAITNTFTNLEPQVDENWIVWRNLSATQTSYFYKILFSIQNEDTGRFMAILPIAFEITVDVQKQQLLFITIKDSARYEVKMK

SEQ ID NO: 479 - protein, 263 aa, Bacillus thuringiensis; identical to SEQ ID NO: 472

SEQ ID NO: 480 - protein, 263 aa, Bacillus thuringiensis; identical to SEQ ID NO: 472

SEQ ID NO: 481 - protein, 263 aa, Bacillus thuringiensis
MYTKNLNSLEINEDYQYSRPIIKKPFRHITLTVPSSDIASFNEIFYLEPQYVAQALRLTNTFQAAIDPLTLNFDFEKALQIANGLPNAGITGTLNQSVIQQTIEISVMISQIKEIIRNVLGLVINSTNFWNSVLAAITNTFTNLEPQVDENWIVWRNLSATHTSYYYKILFSIQNEDTGAFMAVLPIAFEITVDVQKQQLLFITIRDSARYEVKMKALTVVQLLDSYNAPIIDVFNVHNYGLYQSNHPNHHILQNLNLNKIKG

SEQ ID NO: 482 - protein, 880 aa, Bacillus thuringiensis
MKNMKKKLASVVTCTLLAPMFLNGNVNAVYADSKTNQISTTQKNQQKEMDRKGLLGYYFKGKDFSNLTMFAPTRDSTLIYDQQTANKLLDKKQQEYQSIRWIGLIQSKETGDFTFNLSEDEQAIIEINGKIISNKGKEKQVVHLEKGKLVPIKIEYQSDTKFNIDSKTFKELKLFKIDSQNQPQQVQQDELRNPEFNKKESQEFLAKPSKINLFTQKMKREIDEDTDTDGDSIPDLWEENGYTIQNRIAVKWDDSLASKGYTKFVSNPLESHTVGDPYTDYEKAARDLDLSNAKETFNPLVAAFPSVNVSMEKVILSPNENLSNSVESHSSTNWSYTNTEGASVEAGIGPKGISFGVSVNYQHSETVAQEWGTSTGNTSQFNTASAGYLNANVRYNNVGTGAIYDVKPTTSFVLNNDTIATITAKSNSTALNISPGESYPKKGQNGIAITSMDDFNSHPITLNKKQVDNLLNNKPMMLETNQTDGVYKIKDTHGNIVTGGEWNGVIQQIKAKTASIIVDDGERVAEKRVAAKDYENPEDKTPSLTLKDALKLSYPDEIKEIEGLLYYKNKPIYESSVMTYLDENTAKEVTKQLNDTTGKFKDVSHLYDVKLTPKMNVTIKLSILYDNAESNDNSIGKWTNTNIVSGGNNGKKQYSSNNPDANLTLNTDAQEKLNKNRDYYISLYMKSEKNTQCEITIDGEIYPITTKTVNVNKDNYKRLDIIAHNIKSNPISSLHIKTNDEITLFWDDISITDVASIKPENLTDSEIKQIYSRYGIKLEDGILIDKKGGIHYGEFINEASFNIEPLQNYVTKYEVTYSSELGPNVSDTLESDKIYKDGTIKFDFTKYSKNEQGLFYDSGLNWDFKINAITYDGKEMNVFH

SEQ ID NO: 483 - protein, 881 aa, Bacillus thuringiensis
  misc_feature (846)..(846): Xaa can be any naturally occurring amino acid
MKKKLASVVTCTLLAPMFLNGNVNAVYADSKTNQISTTQKNQQKEMDRKGLLGYYFKGKDFSNLTMFAPTRDSTLIYDQQTANKLLDKKQQEYQSIRWIGLIQSKETGDFTFNLSEDEQAIIEINGKIISNKGKEKQVVHLEKGKLVPIKIEYQSDTKFNIDSKTFKELKLFKIDSQNQPQQVQQDELRNPEFNKKESQEFLAKPSKINLFTQKMKREIDEDTDTDGDSIPDLWEENGYTIQNRIAVKWDDSLASKGYTKFVSNPLESHTVGDPYTDYEKAARDLDLSNAKETFNPLVAAFPSVNVSMEKVILSPNENLSNSVESHSSTNWSYTNTEGASVEAGIGPKGISFGVSVNYQHSETVAQEWGTSTGNTSQFNTASAGYLNANVRYNNVGTGAIYDVKPTTSFVLNNDTIATITAKSNSTALNISPGESYPKKGQNGIAITSMDDFNSHPITLNKKQVDNLLNNKPMMLETNQTDGVYKIKDTHGNIVTGGEWNGVIQQIKAKTASIIVDDGERVAEKRVAAKDYENPEDKTPSLTLKDALKLSYPDEIKEIEGLLYYKNKPIYESSVMTYLDENTAKEVTKQLNDTTGKFKDVSHLYDVKLTPKMNVTIKLSILYDNAESNDNSIGKWTNTNIVSGGNNGKKQYSSNNPDANLTLNTDAQEKLNKNRDYYISLYMKSEKNTQCEITIDGEIYPITTKTVNVNKDNYKRLDIIAHNIKSNPISSIHIKTNDEITLFWDDISITDVASIKPENLTDSEIKQIYSRYGIKLEDGILIDKKGGIHYGEFINEASFNIEPLQNYVTKYKVTYSSELGQNVSDTLESDKIYKDGTIKFDFTKYSXNEQGLFYDSGLNWDFKINAITYDGKEMNVFHRYNK

SEQ ID NO: 484 - protein, 803 aa, Bacillus thuringiensis
MNMNNTKLNARALPSFIDYFNGIYGFATGIKDIMNMIFKTDTGGDLTLDEILKNQQLLNEISGKLDGVNGSLNDLIAQGNLNTELSKEILKIANEQNQVLNDVNNKLDAINTMLNIYLPKITSMLSDVMKQNYALSLQIEYLSRQLQEISDKLDVINLNVLINSTLTEITPSYQRIKYVNEKFDKLTFATESTLRAKQGIFNEDSFDNNTLENLTDLAELAKSITKNDVDSFEFYLHTFHDVLIGNNLFGRSALKTASELITKDEIKTSGSEIGKVYSFLIVLTSLQAKAFLTLTTCRKLLGLSDIDYTSIMNEHLNNEKNEFRDNILPALSNKFSNPSYAKTIGSDNYAKVILESEPGYALVGFEIINDPIPVLKAYKAKLKQNYQVDNQSLSEIVYLDIDKLFCPENSEQKYYTKNLTFPDGYVITKITFEKKLNNLIYEATANFYDPSTGDIDLNKKQVESTFPQTDYITMDIGDDDGIYMPLGVISETFLTPINSFGLEVDAKSKTLTLKCKSYLREYLLESDLKNKETGLIAPPNVFISNVVKNWDIEEDSLEPWVANNKNAYVDNTGGIERSKALFTQGDGEFSQFIGDKLKPNTDYIIQYTVKGKPAIYLKNKSTGYITYEDTNGNSEEFQTIAVKFTSETDLSQTHLVFKSQNGYEAWGDNFIILEAKLFETPESPELIKFNDWERFGTTYITGNELRIDHSRGGYFRQSLNIDSYSTYDLSFSFSGLWAKVIVKNSRGVVLFEKVKNNGSSYEDISESFTTASNKDGFFIELTAERTSSTFHSFRDISIKEKIE

SEQ ID NO: 485 - protein, 834 aa, Bacillus thuringiensis
MKNMKKKLASVVTCMLLAPMFLNGNVNAVNADSKINQISTTQENQQKEMDRKGLLGYYFKGKDFNNLTMFAPTRDNTLMYDQQTANALLDKKQQEYQSIRWIGLIQRKETGDFTFNLSKDEQAIIEIDGKIISNKGKEKQVVHLEKEKLVPIKIEYQSDTKFNIDSKTFKELKLFKIDSQNQSQQVQLRNPEFNKKESQEFLAKASKTNLFKQKMKRDIDEDTDTDGDSIPDLWEENGYTIQNKVAVKWDDSLASKGYTKFVSNPLDSHTVGDPYTDYEKAARDLDLSNAKETFNPLVAAFPSVNVSMEKVILSPNENLSNSVESHSSTNWSYTNTEGASIEAGGGPLGLSFGVSVTYQHSETVAQEWGTSTGNTSQFNTASAGYLNANVRYNNVGTGAIYDVKPTTSFVLNNNTIATITAKSNSTALRISPGDSYPEIGENAIAITSMDDFNSHPITLNKQQVNQLINNKPIMLETDQTDGVYKIRDTHGNIVTGGEWNGVTQQIKAKTASIIVDDGKQVAEKRVAAKDYGHPEDKTPPLTLKDTLKLSYPDEIKETNGLLYYDDKPIYESSVMTYLDENTAKEVKKQINDTTGKFKDVNHLYDVKLTPKMNFTIKMASLYDGAENNHNSLGTWYLTYNVAGGNTGKRQYRSAHSCAHVALSSEAKKKLNQNANYYLSMYMKADSTTEPTIEVAGEKSAITSKKVKLNNQNYQRVDILVKNSERNPMDKIYIRGNGTTNVYGDDVTIPEVSAINPASLSDEEIQEIFKDSTIEYGNPSFVADAVTFKNIKPLQNYVKEYEIYHKSHRYEKKTVFDIMGVHYEYSIAREQKKAA

SEQ ID NO: 486 - protein, 769 aa, Bacillus thuringiensis
MKNMKKKLASVVTCTLLAPMFFNGNVNTAYADNKINQDSSKQEYQQKEMDRKGLLGYYFKDKDFSNLTMFSPTRYNTLIYDQQTANKLLDKKQQEYQSIRWIGLIQSNKTGDFTFELSDDECAIIEMDGKVISNKGKEKQVVHLEKGKLVPIKIEYQLDEPLNIDDEKFKGFKLLKVDNQKQLHQVQQDELRNPEFNKKESQEFLAKASKINLFTKKIKRDIDEGTDTDGDSIPDMWEENGYTIQNRIAVKWNDSLASKGYTKFVSNPLDSHTVGDPYTDYEKASRDLDLSNAKETFNPLVAAFPSVNVSMEKVILSPNKNLSNSVESHSSTNWSYTNTEGASVEAGIGPKGFSFGVSANYQHSETVAQEWGASIGDTTQLNTASAGYLNANVRYNNVGTGAIYDVKPTTSFVLEKNTIATITAKSNSTALSISPGESYPKKGQNGIAITSMDDFNSHPITLNKKQLDQVLTNNPIMLETDQTDGIYKIKDTHGNIVTGGTWNGVTQQIKAKTASIIVDDGKQVAEKRVAAKDYAYPEDKTPSLTLKDALKLSFPEEIKETDGLLYYNNKPIYESSVMTYLDGNTAKEVKKQINDKTGEFKDVQHLYAVKLTPKMNFTIKVPVAYDTAKQAVNLGGDNPWGAKGLLGTWVNAMVVDNSGDKAYKRVEPGYLLSPTLEFSEGSLDNLKKNYSFYVSMYVKSDKPFTLRINAGPYSTKRTIEASNDFKRVDIPAFYIEGFPIDTIRLEGSDYPSAIWWKDVSITEVSAVKK

SEQ ID NO: 487 - protein, 784 aa, Bacillus thuringiensis
MTYMKKKLVSVVTCTLLAPMFLNGNVNPVYADNQTNQLSTAQENQEKEVDRKGLLGYYFKGKEFNHLTLFAPTRDNTLIYDQQTVDSLLDKKQQEYQSIRWIGLIQSKETGDFTFNLSDDKNAIMEIDTKTISHKGQNKQVVHLEKGKLVPIKIEYQPDQIVNRDSKIFKEFKLFKVDSKQQSHQVQLDELRNPEFNKKETQQFLEKASKTNLFTQNMKRDEDATDTDGDSIPDLWEENGYTIQNKVAVKWDDSFAAKGYTKFVSNPFDSHTVGDPYTDYEKAARDLDLANAKETFNPLVAAFPSVNVNLEKVILSPNEDLSNSVESHSSTNWSYTNTEGVSIEAGSGPLGISYGVSANYQHSETVAKEWGTSTGNTSQFNTASAGYLNANVRYNNVGTGAIYEVKPTTGFVLDNDTVATITAKSNSTALSISPGESYPKKGQNGIAINTMDDFNSHPITLNKQQLDQIFNNKPLMLETNQADGVYKIKDTSGNIVTGGEWNGVIQQIQAKTASIIVDTGEGVSEKRVAAKDYDNPEDKTPSLSLKEALKLGYPEEIKEKDGLLYYNDKPIYESSVMTYLDENTAKEVKEQLNDITGKFKDVKQLFDVKLTPKMNFTIKLATLYDGAEDGSSPTDVGISSPLGEWAFKPDINNVEGGNTGKRQYQLSKNKDGYYYGMLALSPEVSNKLKKNYQYYISMSIKADAGVEPTVTVMDNLNCIVDKKLKLSSNGYQRFDILVDNSESHPINVMVIDLGVSSQDYNNYSKNIYIDDITITEVSAMKVKN

SEQ ID NO: 488 - protein, 785 aa, Bacillus thuringiensis
MTYMKKKLVSVVTCALLAPMFLNGNVNPVYADNQTNQLSTAQENQEKEVDRKGLLGYYFKGKEFNHLTLFAPTRDNTLIYDQQTVDFLLDKKQQEYQSIRWIGLIQSKETGDFTFNLSDDKNAIIEIDGKTISHKGQNKQVVHLEKGKLVPIKIEYQSDQIVNRDSKIFKEFKLFKVDSQQQSHQVQLDELRNPEFNKKETQQFLEKASKTNIFTQNMKRDEDATDTDGDSIPDLWEENGYTIQNKVAVKWDDSFAAKGYTKFVSNPFDSHTVGDPYTDYEKAARDLDLANAKETFNPLVAAFPSVNVNLEKVILSPNEDLSNSVESHSSTNWSYTNTEGASIEAGSGPLGISYGVSANYQHSETVAKEWGTSTGNTSQFNTASAGYLNANVRYNNVGTGAIYEVKPTTGFVLDNDTVATITAKSNSTALSISPGESYPKKGQNGIAINTMDDFNSHPITLNKQQLDQIFNNKPLMLETNQADGVYKIKDTSGNIVTGGEWNGVIQQIQAKTASIIVDTGEGVSEKRVAAKDYDNPEDKTPSLSLKEALKLGYPEEIKEKDGLLYYNDKPIYESSVMTYLDENTAKEVKEQLNDITGKFKDVKQLFDVKLTPKMNFTIKLATLYDGAEDGSSPTDVGISSPLGEWAFKPDINNVEGGNTGKRQYQLSKNKDGYYYGMLALSPEVSNKLKKNYQYYISMSIKADAGVEPTVTVMDNLLNGIVDKKLKLSSNGYQRFDILVDNSESHPINVMVIDLGVSSQDYNNYSKNIYIDDITITEVSAMKVKN

SEQ ID NO: 489 - protein, 860 aa, Bacillus thuringiensis
MTYMKKKLVSVVTCTLLAPIFLTGNVHPVNADSKKSQPSTAQEKQEKPVDRKGLLGYFFKGKEFNHLTLFAPTRDNTLIYDQQTANSLLDTKQQEYQSIRWIGLIQSKETGDFTFNLSDDQNAIIEIDGKIISHKGQNKQVVHLEKGKLVPIKIEYQSDQILTRDSNIFKEFQLFKVDSQQHSHQVQLDELRNPDFNKKETQQFLEKAAKTNLFTQNMKRDTDDDDDTDTDGDSIPDLWEENGYTIQNKVAVKWDDSFAAKGYTKFVSNPLESHTVGDPYTDYEKAARDLDLANAKETFNPLVAAFPSVNVNLEKVILSPDENLSNSVESHSSTNWSYTNTEGASIEAGGGPLGISFGVSANYQHSETVAKEWGTSTGNTSQFNTASAGYLNANVRYNNVGTGAIYEVKPTTSFVLDKDTVATITAKSNSTALSISPGESYPKKGQNGIAINTMDDFNSHPITLNKQQLDQLLNNKPLMLETNQADGVYKIKDTSGNIVTGGEWNGVIQQIQAKTASIIVDTGESVSEKRVAAKDYDNPEDKTPSLSLKEALKLGYPEEIKEKDGLLYYKDKPIYESSVMTYLDENTAKEVEKQLQDTTGIYKDINHLYDVKLTPTMNFTIKLASLYDGAENNDVKNGPIGHWYYTYNTGGGNTGKHQYRSANPSANVVLSSEAKSKLDKNTNYYLSMYMKAESDTEPTIEVSGENSTITSKKVKLNSEGYQRVDILVPNSERNPINQIYVRGNNTTNVYWDDVSITNISAINPKTLTDEEIKEIYKDFSESKDWPWFNDVTFKNIKPLENYVKQYRVDFWNTNSDRSFNRIKDSYPVNEDGSVKVNMTEYNEGYPLRIESAYHLNISDL

SEQ ID NO: 490 - protein, 803 aa, Bacillus thuringiensis; identical to SEQ ID NO: 484

SEQ ID NO: 491 - protein, 775 aa, Bacillus thuringiensis
MKNMKKKLASVVTCTLLAPMFLNGNVNAVYADSKTNQISTTQKNQQKEMDRKGLLGYYFKGKDFSNLTMFAPTRDNTLIYDQQTANKLLDKKQQQYQSIRWIGLIQSKEKGDFTFNLSEDEQAIIEIDGKIISNKGKEKQVVHLEKEKLVPIKIEYQSDTKFNIDSKTFKEFKLFKIDSQNQSQQVKRDELRNPEFNKKESREFLAKASKTNFFMQKMKRDIDEDTDTDGDSIPDLWEENGYTIQNKVAVKWDDKFAQQGYVKYLSSPYQAHTVGDPYTDWEKAAGDIPKSNAAATRNPLVAAFPSINVDMRKMILSKDSNLSNSAEAHSNNSYTYANSEGASIEAGFGPKGFSFGVSANYQHTETVGSDWGNSKSNTEQFNSASAGYLNANVHYNNVGTGGIYDAQPTTSFILQDSTIATITAKSNATALSIPSGDRYPASKEGISLKTMDDFNSHPITLNKPQLDAVLNNEVIKINTDQTDGRYGIIGVDGKAEIGDRWSPIIDEIKGRTASIIIDPADGKALETRIAAKDYKNPEDKTPSLTIKEGLKIAYPESISEDKDGILFYEYKNDEGKVTKKQLSEENIMPYLDEDTSKEFERQLSDGSAKGLYDIKLTPKMNITIRLATVTLGFDDQFSAYPWENATWSDKFGNLRLGSLAIPQESKYTIPKDKVKPNYDYLITGYIKHDFTTDNESLGIVAFTKKDNFEMWNMGTSIFSQNSGGEFKKFTIKTQNISGDYILDSIQLMKRNNDVNKIDSYLDDISIIPIGPNKSR

SEQ ID NO: 492 - protein, 871 aa, Bacillus thuringiensis
MKYMKKGLSSVVIGTLFASMFLNGNVNAVYANSKTNQIATTTQASKDNQIDREGLLGYYFKGKDFNDLTLFAPTRDNTLIYDQQTANTLVDQKHQEYHSIRWIGLIQSSATGDFTFKLSDDENAIIELDGKVISEKGNNKQSVHLEKGQLVQIKIEYQSDDALHIDNKIFKELKLFKIDSQNHSQQVQQDELRNPEFNKKETQVFLKKASKTNLFTQKTKRDIDEDTDTDGDSIPDVWEENGYTIQNKVAVKWDDSLASKGYQKFTSNPLEAHTVGDPYSDYEKAARDMPLSNAKETFNPLVAAFPSVNVSLEKVILSKNEDLSHSVESSQSTNWSYTNTEGVNVNAGWSGLGPSFGVSVNYQHSETVANEWGSATNDGTHINGAESAYLNANVRYNNVGTGAIYETKPTTSFILDGTTIGTIKAKENTTALTILPDQSYPEKGKNGIAINTMDDFNSRPIPLNKEQLNTYLSNKKPILLETDQVEGKYAIKDTNGNITIAGDWNGITDEISAKTASIIVDNGNQMSEKRVAAKDYTNPEDKTPNLSVKEALKLAYPDEIEEKDGLLFYNDQPIFEASVQSYVDEYTAKQIRKQLNDSTGSFKDVKNLYDVKLEPKMNFTIKTSTLYDGGESDNTKIGNWYYTYVVNGGNTGKKQYRSANKGAFTELSTESKNKLKKNIDYYVSLYMKADSKVSVDIEIDGKQESIVTDNITLDHVGYQRINILVPNLEGNEINTISIKGDGQTNVYWDDVSFVEVGAEEIEYKDPVPQFDIIEGDFDFFGDPLAVKYHDATYFIDSPLITQTPGTFSFTYKVIGEQTKTVLDSGSGKNANRINLDFKNVKSDRSFLYTLSCKDDLWGSTRTAVVRIFAVD

SEQ ID NO: 493 - protein, 280 aa, Bacillus thuringiensis
MKRMEGKLFMVSKKLQVVTKTVLLSTVFSISLLNNEVIKAEQLNINSQSKYTNLQNLKITDKVEDFKEDKEKAKEWGKEKEKEWKLTATEKGKMNNFLDNKNDIKTNYKEITFSMAGSFEDEIKDLKEIDKMFDKTNLSNSIITYKNVEPTTIGFNKSLTEGNTINSDAMAQFKEQFLDRDIKFDSYLDTHLTAQQVSSKERVILKVTVPSGKGSTTPTKAGVILNNSEYKMLIDNGYMVHVDKVSKVVKKGVECLQIEGTLKKSLDFKNDINAEAHSWG

SEQ ID NO: 494 - protein, 446 aa, Bacillus thuringiensis
MFMVSKKLQVVTKTVLLSTVFSISLLNNEVIKAEQLNINSQSKYTNLQNLKITDKVEDFKEDKEKAKEWGKEKEKEWKLTATEKGKMNNFLDNKNDIKTNYKEITFSMAGSFEDEIKDLKEIDKMFDKTNLSNSIITYKNVEPTTIGFNKSLTEGNTINSDAMAQFKEQFLDRDIKFDSYLDTHLTAQQVSSKERVILKVTVPSGKGSTTPTKAGVILNNSEYKMLIDNGYMVHVDKVSKVVKKGVECLQIEGTLKKSLDFKNDINAEAHSWGMKNYEEWAKDLTDSQREALDGYARQDYKEINNYLRNQGGSGNEKLDAQIKNISDALGKKPIPENITVYRWCGMPEFGYQISDPLPSLKDFEEQFLNTIKEDKGYMSTSLSSERLAAFGSRKIILRLQVPKGSTGAYLSAIGGFASEKEILLDKDSKYHIDKVTEVIIKVLSDM

SEQ ID NO: 495 - protein, 803 aa, Bacillus thuringiensis; identical to SEQ ID NO: 484

SEQ ID NO: 496 - protein, 462 aa, Bacillus thuringiensis
MQRMEGKLFVVSKTLQVVTRTVLLSTVYSITLLNNVVIKADQLNINSQSKYTNLQNLKIPDNAEDFKEDKGKAKEWGKEKGEEWRPPATEKGEMNNFLDNKNDIKTNYKEITFSMAGSCEDEIKDLEEIDKIFDKANLSSSIITYKNVEPATIGFNKSLTEGNTINSDAMAQFKEQFLGKDMKFDSYLDTHLTAQQVSSKKRVILKVTVPSGKGSTTPTKAGVILNNNEYKMLIDNGYVLHVDKVSKVVKKGMECLQVEGTLKKSLDFKNDINAEAHSWGMKIYEDWAKNLTASQREALDGYARQDYKEINNYLRNQGGSGNEKLDAQLKNISDALGKKPIPENITVYRWCGMPEFGYQISDPLPSLKDFEEQFLNTIKEDKGYMSTSLSSERLAAFGSRKIILRLQVPKGSTGAYLSAIGGFASEKEILLDKDSKYHIDKATEVIIKGVKRYVVDATLLTN

SEQ ID NO: 497 - protein, 280 aa, Bacillus thuringiensis
MKRMEGKLFMVSTKLQAVTKAVLLSTVLSISLLNNEVIKAEQLNMNSQNKYTNFENLKITDKVEDFKEDKEKAKEWGKEKEKEWKLTATEKGKMNNFLDNKNDIKTNYKEITFSMAGSFEDEIKDLKEIDKIFDKANLSSPIITYKNVEPATIGFNKSLTEGNTINSDAMAQFKEQFLDRDIKFDSYLDTHLTVQQVSSKERVILKVKVPSGKGSTTPTKAGIILNNSEYKMLIDNGYMVHVDKVSKVVKKGVECLQVEGTLKKSLDFKNDINAGAHSWG

SEQ ID NO: 498 - protein, 457 aa, Bacillus thuringiensis
MIVIIFTNVKGGNELKKNFYKNLICMSALLLAMPISSNVTYAYGSEKVDYLVKTTNNTEDFKEDKEKAKEWGKEKEKEWKLTVTEKTRMNNFLDNKNDIKKNYKEITFSMAGSFEDEIKDLKEIDKMFDKANLSSSIVTYKNVEPSTIGFNKPLTEGNTINTDVQAQFKEQFLGKDIKFDSYLDTHLTAQNVSSKERIILQVTVPSGKGSTIPTKAGVILNNNEYKMLIDNGYVLHVDNISKVVKKGYECLQIQGTLKKSLDFKNDINAEAHRWGMKNYEGWAKNLTDPQREALDGYARQDYKQINDYLRNQGGSGNEKLDTQIKNISEALEKQPIPENITVYRWCGMAEFGYQISDPLPSLKEMEEKFLNTMKEDKGYMSTSLSSERLSAFGSRKFILRLQVPKGSTGAYLSAIGGFASEKEILIDKDSNYHIDKITEVVIKGVKRYVVDATLLTK

SEQ ID NO: 499 - protein, 462 aa, Bacillus thuringiensis
MQRMEGKLFMVSKKLQAVTKTVLLSTVLSISLLNNEEVKAEQLNINSQNKYTNFQNLKITDNAEDFKEDKEKAKEWGEEKEKEWKLTATEKGKMNNFLDNKNDIKTNYKEITFSMAGSFEDEIKDLKEIDKIFDKANLSSSIITYKNVEPATIGFNKSLTEGNTINSDAMAQFKEQFLGKDMKFDSYLDTHLTAHQVSSKKRVILKVTVPSGKGSTTPTKAGVILTNNEYKMLIDNGYVLHVDKVSKVVKKGMECLQVEGTLKKSLDFKNDINAEAHSWGMKIYEDWAKNLTASQREALDGYARQDYKEINNYLRNQGGSGNEKLDAQIKNISDALGKKPIPENITVYRWCGMPEFGYQISDPLPSLKDFEEQFLNTIKEDKGYMSTSLSSERLAAFGSRKIILRLQVPKGSTGAYLSAIGGFASEKEILLDKDSKYHIDKATEVIIKGVKRYVVDATLLTN

SEQ ID NO: 500 - protein, 280 aa, Bacillus thuringiensis
MKRMEGKLFMVSKKLQLVTKALLFSTVLSIPLLNNEEVKAEHLNLNSQSKYPSFQNQKITDNAEDFKEDKEKAKEWGEVKEKEWKLTATEKRKINDFLNDTNKIKTNYKEITFSMAGSFEDELKDLKEIDKMFDKANLSSSIITYKNVEPATIGFNKSLTEGNTINSDVMAQFKEQFLGKDIKFDSYLDTHLTVQQVSSKERVILKVTVPSGKGSTTPTKAGVILDGNEHKMLIDNGYVLHVDKVSKVVKRGLECLQVEGTLKKSLDFKNDISAKAHSWG

SEQ ID NO: 501 - protein, 462 aa, Bacillus thuringiensis
MKRMEGKLFMVSKKLQLVTKALLFSTVLSIPLLNNEEVKAEHLNLNSQSKYPSFQNQKITDNAEDFKEDKEKAKEWGEVKEKEWKLTATEKRKINDFLNDTNKIKTNYKEITFSMAGSFEDELKDLKEIDKMFDKANLSSSIITYKNVEPATIGFNKSLTEGNTINSDVMAQFKEQFLGKDIKFDSYLDTHLTVQQVSSKERVILKVTVPSGKGSTNPTKAGVILDGNEHKMLIDNGYVLHVDKVSKVVKKGLECLQVEGTLKKSLDFKNDISAKAHSWGMKNYEEWAANLTDSQRKALDGYARQDYKKINDYLRNQGGSGNEQLDAQIKNISETLNNKPIPENITVYRWCGMPEFGYQISEPLPALKDFEWEFLNTIKEDKGYISTSLSSERLAAFGSRKIILRLQIPKGSKGAYLSAIGGFANEKEILLDKDSKYHINKITEVVIKGIKRYVVDATLLTN

SEQ ID NO: 502 - protein, 280 aa, Bacillus thuringiensis
MKRMEGKLFMVSRKLQLVTKALLFSTVLSIPLLNNEEVKAEHLNLNSQSKYPSFQNQKITDNAEDFKEDKEKAKEWGEVKEKEWKLTATEKRKINDFLNDTNKIKTNYKEITFSMAGSFEDELKDLKEIDKMFDKANLSSSIITYKNVEPATIGFNKSLTEGNTINSDVMAQFKEQFLGKDIKFDSYLDTHLTVQQVSSKERVILKVTVPSGKGSTNPTKAGVILDGNEPKMLIDNGYVLHVDKVSKVVKKGLECLQVEGTLKKSLDFKNDISAKAHSWG

SEQ ID NO: 503 - protein, 462 aa, Bacillus thuringiensis
MKRMEGKLFMVSKKLQLVTKALLFSTVLSIPLLNNEEVKAEHLNLNSQSKYPSFQNQKITDNAEDFKEDKEKAKEWGEVKEKEWKLTATEKRKINDFLNDTNKIKTNYKEITFSMAGSFEDELKDLKEIDKMFDKANLSSSIITYKNVEPATIGFNKSLTEGNTINSDVMAQFKEQFLGKDIKFDSYLDTHLTVQQVSSKERVILKVTVPSGKGSTTPTKAGVILDGNEHKMLIDNGYVLHVDKVSKVVKRGLECLQVEGTLKKSLDFKNDISAKAHSWGMKNYEEWAANLTDSQRKALDGYARQDYKKINDYLRNQGGSGNEQLDAQIKNISETLNNKPIPENITVYRWCGMPEFGYQISEPLPALKDFEWEFLNTIKEDKGYISTSLSSERLAAFGSRKIILRLQIPKGSKGAYLSAIGGFANEKEILLDKDSKYHINKITEVVIKGIKRYVVDATLLTN

SEQ ID NO: 504 - protein, 451 aa, Bacillus thuringiensis
MVSKKLQLITKTLVFSTVLSIPLLNNSEIKAEQLNMNSQIKYPNFQNINIADKPVDFKEDKEKAREWGKEKEKEWKLTVTEKGKINDFLDDKDGLKTKYKEINFSKNFEYETELKELEKINTMLDKANLTNSIVTYKNVEPTTIGFNQSLIEGNQINAEAQQKFKEQFLGQDIKFDSYLDMHLTEQNVSSKERVILKVTVPSGKGSTPTKAGVVLNNNEYKMLIDNGYVLHVENITKVVKKGQECLQVEGTLKKSLDFKNDSDGKGDSWGKKNYKEWSDTLTTDQRKDLNDYGVRGYTEINKYLREGDTGNTELEEKIKNISDALEKNPIPENITVYRYCGMAEFGYPIKPEAPSVQDFEERFLDTIKEEKGYMSTSLSSDATSFGARKIILRLQVPKGSSGAYVAGLDGFKPAEKEILIDKGSKYRIDKVTEVVVKGTRKLVVDATLLTK

SEQ ID NO: 505 - protein, 350 aa, Bacillus thuringiensis
MKRMEERLFMVSKKLQLITKTLVFSTVLSIPLLNNSEIKAEQLNMNSQIKYPNFQNINIADKPVDFKEDKEKAREWGKEKEKEWKLTATEKGKINDFLDDKDGLKTKYKEINFSKNFEYETELKELEKINTMLDKANLTNSIVTYKNVEPTTIGFNQSLIEGNQINAEAQQKFKEQFLGQDIKFDSYLDMHLTEQNVSSKERVILKVTVPSGKGSTPTKAGVVLNNNEYKMLIDNGYVLHVENITKVVKKGQECLQVEGTLKKSLDFKNDSDGKGDSWGKKNYKEWSDTLTTDQRKDLNDYGARGYTEINKYLREGGTGNTELEEKIKNISDALEKNPIPENITVYRYCG

SEQ ID NO: 506 - protein, 860 aa, Bacillus thuringiensis; identical to SEQ ID NO: 489

SEQ ID NO: 507 - protein, 803 aa, Bacillus thuringiensis; identical to SEQ ID NO: 484

SEQ ID NO: 508 - protein, 789 aa, Bacillus thuringiensis
MNKNNTKLSTRALPSFIDYFNGIYGFATGIKDIMNMIFKTDTGGDLTLDEILKNQQLLNDISGKLDGVNGSLNDLIAQGNLNTELSKEILKIANEQNQVLNDVNNKLDAINTMLRVYLPKITSMLSDVMKQNYALSLQIEYLSKQLQEISDKLDIINVNVLINSTLTEITPAYQRIKYVNEKFEELTFATETSSKVKKDGSPADILDELTELTELAKSVTKNDVDGFEFYLNTFHDVMVGNNLFGRSALKTASELITKENVKTSGSEVGNVYNFLIVLTALQAQAFLTLTTCRKLLGLADIDYTSIMNEHLNKEKEEFRVNILPTLSNTFSNPNYAKVKGSDEDAKMIVEAKPGHALIGFEISNDSITVLKVYEAKLKQNYQVDKDSLSEVIYGDMDKLLCPDQSEQIYYTNNIVFPNEYVITKIDFTKKMKTLRYEVTANFYDSSTGEIDLNKKKVESSEAEYRTLSANDDGVYMPLGVISETFLTPINGFGLQADENSRLITLTCKSYLRELLLATDLSNKETKLIVPPSGFISNIVENGSIEEDNLEPWKANNKNAYVDHTGGVNGTKALYVHKDGGISQFIGDKLKPKTEYVIQYTVKGKPSIHLKDENTGYIHYEDTNNNLEDYQTINKRFTTGTDLKGVYLILKSQNGDEAWGDNFIILEISPSEKLLSPELINTNNWTSTGSTNISGNTLTLYQGGRGILKQNLQLDSFSTYRVYFSVSGDANVRIRNSREVLFEKRYMSGAKDVSEMFTTKFEKDNFYIELSQGNNLYGGPIVHFYDVSIK

SEQ ID NO: 509 - protein, 789 aa, Bacillus thuringiensis
MNKNNTKLSTRALPSFIDYFNGIYGFATGIKDIMNMIFKTDTGGDLTLDEILKNQQLLNDISGKLDGVNGSLNDLIAQGNLNTELSKEILKIANEQNQVLNDVNNKLDAINTMLRVYLPKITSMLSDVMKQNYALSLQIEYLSKQLQEISDKLDIINVNVLINSTLTEITPAYQRIKYVNEKFEELTFATETSSKVKKDGSPADIRDELTELTELAKSVTKNDVDGFEFYLNTFHDVMVGNNLFGRSALKTASELITKENVKTSGSEVGNVYNFLIVLTALQAKAFLTLTPCRKLLGLADIDYTSIMNEHLNKEKEEFRVNILPTLSNTFSNPNYAKVKGSDEDAKMIVEAKPGHALIGFEISNDSITVLKVYEAKLKQNYQVDKDSLSEVIYGDMDKLLCPDQSGQIYYTNNIVFPNEYVITKIDFTKKMKTLRYEVTANFYDSSTGEIDLNKKKVESSEAEYRTLSANDDGVYMPLGVISETFLTPINGFGLQADENSRLITLTCKSYLRELLLATDLSNKETKLIVPPSGFISNIVENGSIEEDNLEPWKANNKNAYVDHTGGVNGTKALYVHKDGGISQFIGDKLKPKTEYVIQYTVKGKPSIHLKDENTGYIHYEDTNNNLEDYQTINKRFTTGTDLKGVYLILKSQNGDEAWGDNFIILEISPSEKLLSPELINTNNWTSTGSTNISGNTLTLYQGGRGILKQNLQLDSFSTYRVYFSVSGDANVRIRNSREVLFEKRYMSGAKDVSEMFTTKFEKDNFYIELSQGNNLYGGPIVHFYDVSIK

SEQ ID NO: 510 - protein, 746 aa, Bacillus thuringiensis
MNKNNAKLSTRALPSFIDYFNGIYGFATGIKDIMNMIFKTDTGGDLALDEILENQQLLNDISGKLDGVNGSLNDLIAQGNLNTELSKEILKIANEQNQVLNDVNNKLDAINTMLRVYLPKITSMLSDVMKQNYALSLQIEYLSKQLQEISDKLDIINVNVLINSTLTEITPAYQRIKYVNEKFEELTFATETSSKVKKDGSPADIRDELSELTELAKSVTQNDVDGFEFYLNTFHDVMVGNNLFGRSALKTASELITKENVKTSGSEVGNVYNFLIVLTALQAQAFLTLTPCRKLLGLADIDYTSIMNEHLNKEKEEFRVNILPTLSNTFSNPNYAKVKGSDEDAKMIVEAKPGHALIGFEISNDSITVLKVYEAKLKQNYQVDKDSLSEVIYGDMDKLLCPDQSGQIYYTNNIVFPNEYVITKIDFTKKMKTLRYEVTANFYDSSTGEIDLNKKKVESSEAEYRTLSANDDGVYMPLGVISETFLTPINGFGLQADENSRLITLTCKSYLRELLLATDLSNKETKLIVPPSGFISNIVENGSIEEDNLEPWKANNKNAYVDHTGGVNGTKALYVHKDGGISQFIGDKLKPKTEYVIQYTVKGKPSIHLKDENTGYIHYEDTNNNLEDYQTINKRFTTGTDLKGVYLILKSQNGDEAWGDNFIILEISPSEKLLSPELINTNNWTSTGSTNISGNTLTLYQGGRGILKQNLQLDSFSTYRVYFSVSGDANVRIRNSREVLFEKKDI

SEQ ID NO: 511 - protein, 790 aa, Bacillus thuringiensis
MNKNNTKLSTRALPSFIDYFNGIYGFATGIKDIMNMIFKTDTGGDLTLDEILKNQQLLNDISGKLDGVNGSLNDLIAQGNLNTELSKEILKIANEQNQVLNDVNNKLDAINTMLRVYLPKITSMLSDVMKQNYALSLQIEYLSKQLQEISDKLDIINVNVLINSTLTEITPAYQRIKYVNEKFEELTFATETSSKVKKDGSPANILDELTELTELAKSVTKNDVDGFEFYLNTFHDVMVGNNLFGRSALKTASELITKENVKTSGSEVGNVYNFLIVLTALQAKAFLTLTTCRKLLGLADIDYTSIMNEHLNKEKEEFRVNILPTLSNTFSNPNYAKVKGSDEDAKMIVEAKPGHALIGFEISNDSITVLKVYEAKLKQNYQVDKDSLSEVIYGDMDKLLCPDQSEQIYYTNNIVFPNEYVITKIDFTKKMKTLRYEVTANFYDSSTGEIDLNKKKVESSEAEYKTLSANDDGVYMPLGVISETFLTPINGFGLQADENSRLITLTCKSYLRELLLATDLSNKETKLIVPPSGFISNIVENGSIEEDNLEPWKANNKNAYVDHTGGVNGTKALYVHKDGGISQFIGDNLKPKTEYVIQYTVKGKPSIHLIDENTGYIHYEDTNNNLEDYQTINKRFTTGTDLKGVYLILKSQNGDEAWGDNFIILEISPSEKLLSPELINTNNWTSTGSTNISGNTLTLYQGGRGILKQNLQLDSFSTYRVYFSVSGDANVRIRNSREVLFEKRYMSGAKDVSEMFTTKFEKDNFYIELSQGNNLYGGPIVHFYDVSIKP

SEQ ID NO: 512 - protein, 789 aa, Bacillus thuringiensis
MNKNNTKLSTRALPSFIDYFNGIYGFATGIKDIMNMIFKTDTGGDLTLDEILKNQQLLNDISGKLDGVNGSLNDLIAQGNLNTELSKEILKIANEQNQVLNDVDNKLDAINTMLRVYLPKITSMLSDVMKQNYALSLQIEYLSKQLQEISDKLDIINVNVLINSTLTEITPAYQRIKYVNEKFEELTFATETSSKVKKDGSPADILDELTELTELAKSVTKNDVDGFEFYLNTFHDVMVGNNLFGRSALKTASELITKENVKTSGSEVGNVYNFLIVLTALQAKAFLTLTTCRKLLGLADIDYTSIMNEHLNKEKEEFRVNILPTLSNTFSNPNYAKVKGSDEDAKMIVEAKPGHALVGFEISNDSITVLKVYEAKLKQNYQVDKDSLSEVIYGDMDKLLCPDQSEQIYYTNNIVFPNEYVITKIDFTKKMKTLRYEVTANFYDSSTGEIDLNKKKVESSEAEYRTLSANDDGVYMPLGVISETFLTPINGFGLQADENSRLITLTCKSYLRELLLATDLSNKETKLIVPPSGFIKNIVENGSIEEDNLEPWKANNKNEYVDHTGGVNGTKALYVHKDGGISQFIGDKLKPKTEYVIQYTVKGKPSIHLKDENTGYIHYEDTNNNLEDYQTITKRFTTGTDLKGVYLILKSQNGDEAWGDNFIILEISPSEKLLSPELINTNNWTSTGSTNISGNTLTLYQGGRGILKQNLQLDSFSTYRVYFSVSGDANVRIRNSREVLFEKRYMSGAKDVSEIFTTKFGKDNFYIELSQGNNLNGGPIVQFPDVSIK

SEQ ID NO: 513 - protein, 790 aa, Bacillus thuringiensis
MNKNNTKLSTRALPSFIDYFNGIYGFATGIKDIMNMIFKTDTGGDLTLDEILKNQQLLNDISGKLDGVNGSLNDLIAQGNLNTELSKEILKIANEQNQVLNDVNNKLDAINTMLRVYLPKITSMLSDVMKQNYALSLQIEYLSKQLQEISDKLDIINVNVLINSTLTEITPAYQRIKYVNEKFEELTFATETSSKVKKDGSPADILDELTELTELAKSVTKNDVDGFEFYLNTFHDVMVGNNLFGRSALKTASELITKENVKTSGSEVGNVYNFLIVLTALQAKAFLTLTTCRKLLGLADIDYTSIMNEHLNKEKEEFRVNILPTLSNTFSNPNYAKVKGSDEDAKMIVEAKPGHALIGFEISNDSITVLKVYEAKLKQNYQVDKDSLSEVIYGDMDKLLCPDQSEQIYYTNNIVFPNEYVITKIDFTKKMKTLRYEVTANFYDSSTGEIDLNKKKVESSEAEYRTLSANDDGVYMPLGVISETFLTPINGFGLQADENSRLITLTCKSYLRELLLATDLSNKETKLIVPPSGFISNIVENGSIEEDNLEPWKANNKNAYVDHTGGVNGTKALYVHKDGGISQFIGDKLKPKTEYVIQYTVKGKPSIHLKDENTGYIHYEDTNNNLEDYQTINKRFTTGTDLKGVYLILKSQNGDEAWGDNFIILEISPSEKLLSPELINTNNWTSTGSTNISGNTLTLYQGGRGILKQNLQLDSFSTYRVYFSVSGDANVRIRNSREVLFEKRYMSGAKDVSEMFTTKFEKDNFYIELSQGNNLYGGPIVHFYDVSIKP

SEQ ID NO: 514 - protein, 789 aa, Bacillus thuringiensis
MNKNNTKLSTRALPSFIDYFNGIYGFATGIKDIMNMIFKTDTGGDLTLDEILKNQQLLNDISGKLDGVNGSLNDLIAQGNLNTELSKEILKIANEQNQVLNDVNNKLDAINTMLRVYLPKITSMLSDVMKQNYALSLQIEYLSKQLQEISDKLDIINVNVLINSTLTEITPAYQRIKYVNEKFEELTFATETSSKVKKDGSPADILDELTELTELAKSVTKNDVDGFEFYLNTFHDVMVGNNLFGRSALKTASELITKENVKTSGSEVGNVYNFLIVLTALQAKAFLTLTTCRKLLGLADIDYTSIMNEHLNKEKEEFRVNILPTLSNTFSNPNYAKVKGSDEDAKMIVEAKPGHALIGFEISNDSITVLKVYEAKLKQNYQVDKDSLSEVIYGDMDKLLCPDQSEQIYYTNNIVFPNEYVITKIDFTKKMKTLRYEVTANFYDSSTGEIDLNKKKVESSEAEYRTLSANDDGVYMPLGVISETFLTPINGFGLQADENSRLITLTCKSYLRELLLATDLSNKETKLIVPPSGFISNIVENGSIEEDNLEPWKANNKNAYVDHTGGVNGTKALYVHKDGGISQFIGDKLKPKTEYVIQYTVKGKPSIHLKDENTGYIHYEDTNNNLEDYQTINKRFTTGTDLKGVYLILKSQNGDEAWGDNFIILEISPSEKLLSPELINTNNWTSTGSTNISGNTLTLYQGGRGILKQNLQLDSFSTYRVYFSVSGDANVRIRNSREVLFEKRYMSGAKDVSEMFTTKFEKDNFYIELSQGNNLYGGPIVHFYDVSIK

SEQ ID NO: 515 - protein, 657 aa, Bacillus thuringiensis
MNKNNTKLSTRALPSFIDYFNGIYGFATGIKDIMNMIFKTDTGGDLTLDEILKNQQLLNDISGKLDGVNGSLNDLIAQGNLNTELSKEILKIANEQNQVLNDVNNKLDAINTMLRVYLPKITSMLSDVMKQNYALSLQIEYLSKQLQEISDKLDIINVNVLINSTLTEITPAYQRIKYVNEKFEELTFATETSSKVKKDGSPADILDELTELTELAKSVTKNDVDGFEFYLNTFHDVMVGNNLFGRSALKTASELITKENVKTSGSEVGNVYNFLIVLTALQAKAFLTLATCRKLLGLADIDYTSIMNEHLNKEKEEFRVNILPTLSNTFSNPNYAKVKGSDEDAKMIVEAKPGHALVGFEINNDSITVLKVYEAKLKQNYQVDKDSLSEVIYGDMDKLLCPDQSEQIYYTNNIVFPNEYVITKIDFTKKMKTLRYEVTANFYDSSTGEIDLNKKKVESSEAEYRTLSANDDGVYMPLGVISETFLTPINGFGLQADENSRLITLTCKSYLRELLLATDLSNKETKLIVPPSGFIKNIVENGSIEEDNLEPWKANNKNAYVDHTGGVNGTKALYVHKDGGISQFIGDKLKPKTEYVIQYTVKGKPSIHLKDENTGYIHYEDTNNNLEDYQTITKRFTTGTDLKGVYLILKSQNGDEA

SEQ ID NO: 516 - protein, 789 aa, Bacillus thuringiensis
MNKNNTKLSTRALPSFIDYFNGIYGFATGIKDIMNMIFKTDTGGDLTLDEILKNQQLLNDISGKLDGVNGSLNDLIAQGNLNTELSKEILKIANEQNQVLNDVNNKLDAINTMLRVYLPKITSMLSDVMKQNYALSLQIEYLSKQLQEISDKLDIINVNVLINSTLTEITPAYQRIKYVNEKFEELTFATETSSKVKKDGSPADILDELTELTELAKSVTKNDVDGFEFYLNTFHDVMVGNNLFGRSALKTASELITKENVKTSGSEVGNVYNFLIVLTALQAKAFLTLTTCRKLLGLADIDYTSIMNEHLNKEKEEFRVNILPTLSNTFSNPNYAKVKGSDEDAKMIVEAKPGHALIGFEISNDSITVLKVYEAKLKQNYQVDKDSLSEVIYGDMDKLLCPDQSEQIYYTNNIVFPNEYVITKIDFTKKMKTLRYEVTANFYDSSTGEIDLNKKKVESSEAEYRTLSANDDGVYMPLGVISETFLTPINGFGLQADENSRLITLTCKSYLRELLLATDLSNKETKLIVPPSGFISNIVENGSIEEDNLEPWKANNKNAYVDHTGGVNGTKALYVHKDGGISQFIGDKLKPKTEYVIQYTVKGKPSIHLKDENTGYIHYEDTNNNLEDYQTINKRFTTGTDLKGVYLILKSQNGDEAWGDNFIILEISPSEKLLSPELINTNNWTSTGSTNISGNTLTLYQGGRGILKQNLQLDSFSTYRVYFSVSGDANVRIRNSREVLFGKRYMSGAKDVSEMFTTKFEKDNFYIELSQGNNLYGGPIVHFYDVSIK

SEQ ID NO: 517 - protein, 789 aa, Bacillus thuringiensis; identical to SEQ ID NO: 514

SEQ ID NO: 518 - protein, 789 aa, Bacillus thuringiensis; identical to SEQ ID NO: 514

SEQ ID NO: 519 - protein, 789 aa, Bacillus thuringiensis; identical to SEQ ID NO: 514

SEQ ID NO: 520 - protein, 789 aa, Bacillus thuringiensis
MNKNNTKLSTRALPSFIDYFNGIYGFATGIKDIMNMIFKTDTGGDLTLDEILKNQQLLNDISGKLDGVNGSLNDLIAQGNLNTELSKEILKIANEQNQVLNDVNNKLDAINTMLRVYLPKITSMLSDVMKQNYALSLQIEYLSKQLQEISDKLDIINVNVLINSTLTEITPAYQRIKYVNEKFEELTFATETSSKVKKDGSPADILDELTELTELAKSVTKNDVDGFEFYLNTFHDVMVGNNLFGRSALKTASELITKENVKTSGSEVGNVYNFLIVLTALQAKAFLTLTTCRKLLGLADIDYTSIMNEHLNKEKEEFRVNILPTLSNTFSNPNYAKVKGSDEDAKMIVEAKPGHALIGFEISNDSITVLKVYEAKLKQNYQVDKDSLSEVIYGDMDKLLCPDQSEQIYYTNNIVFPNEYVITKIDFTKKMKTLRYEVTANFYDSSTGEIDLNKKKVESSEAEHRTLSANDDGVYMPLGVISETFLTPINGFGLQADENSRLITLTCKSYLRELLLATDLSNKETKLIVPPSGFISNIVENGSIEEDNLEPWKANNKNAYVDHTGGVNGTKALYVHKDGGISQFIGDKLKPKTEYVIQYTVKGKPSIHLKDENTGYIHYEDTNNNLEDYQTINKRFTTGTDLKGVYLILKSQNGDEAWGDNFIILEISPSEKLLSPELINTNNWTSTGSTNISGNTLTLYQGGRGILKQNLQLDSFSTYRVYFSVSGDANVRIRNSREVLFEKRYMSGAKDVSEMFTTKFEKDNFYIELSQGNNLYGGPIVHFYDVSIK

SEQ ID NO: 521 - protein, 789 aa, Bacillus thuringiensis
MNKNNTKLSTRALPSFIDYFNGIYGFATGIKDIMNMIFKTDTGGDLTLDEILKNQQLLNDISGKLDGVNGSLNDLIAQGNLNTELSKEILKIANEQNQVLNDVNNKLDAINTMLRVYLPKITSMLSDVMKQNYALSLQIEYLSKQLQEISDKLDIINVNVLINSTLTEITPAYQRIKYVNEKFEELTFATETSSKVKKDGSPADILDELTELTGLAKSVPKNDVDGFEFYLNTFHDVMVGNNLFGRSALKTASELITKENVKTSGSEVGNVYNSLIVLTLLQAKAFLTLTTCRKLLGLADIDYTSIMNEHLNKEKEEFRVNIPPTLSNTFSNPNYAKVKGSDEDAKMIVEAKPGHALVGFEISNDSITVLKVYEAKLKQNYQVDKDSLSEVIYGDMDKLLGPDQSGPIYYPNNIVFPNEYVITKIDFTKKMKTLRYEVTANFYDSSTGEIDLNKKKVESSEAEYRTLSANDDGVYMPLGVISETFLTPINGFGLQADENSRLITLTCKSYLRELLLATDLSNKETKLIVPPSGFIKNIVENGSIEEDNLEPWKANNKNAYVDHTGGVNGTKALYVHKDGGISQFIGDKLKPKTEYVIQYTVKGKPSIHLKDENTGYIHYEDTNNNLEDYQTITKRFTTGTDLKGVYLILKSQNGDEAWGDNFIILEISPSEKLLSPELINTNNWTSTGSTNISGNTLTLYQGGRGILKQNLQLDSFSTYRVYFSVSGDANVRIRNSREVLFEKRYMSGAKDVSEIFTTKLGKDNFYIELSQGNNLNGGPIVKFYDVSIK

SEQ ID NO: 522 - protein, 789 aa, Bacillus thuringiensis; identical to SEQ ID NO: 514

SEQ ID NO: 523 - protein, 789 aa, Bacillus thuringiensis
MNKNNTKLSTRALPSFIDYFNGIYGFATGIKDIMNMIFKTDTGGDLTLDEILKNQQLLNDISGKLDGVNGSLNDLIAQGNLNTELSKEILKIANEQNQVLNDVNNKLDAINTMLRVYLPKLTSMLSDVMKQNYALSLQIEYLSKQLQEISDKLDIINVNVLINSTLTEITPAYQRIKYVNEKFEELTFATETSSKVKKDGSPADILDELTELTELAKSVTKNDVDGFEFYLNTFHDVMVGNNLFGRSALKTASELITKENVKTSGSEVGNVYNFLIVLTALQAKAFLTLTTCRKLLGLADIDYTSIMNEHLNKEKEEFRVNILPTLSNTFSNPNYAKVKGSDEDAKMIVEAKPGHALIGFEISNDSITVLKVYEAKLKQNYQVDKDSLSEVIYGDMDKLLCPDQSEQIYYTNNIVFPNEYVITKIDFTKKMKTLRYEVTANFYDSSTGEIDLNKKKVESSEAEYRTLSANDDGVYMPLGVISETFLTPINGFGLQADENSRLITLTCKSYLRELLLATDLSNKETKLIVPPSGFISNIVENGSIEEDNLEPWKANNKNAYVDHTGGVNGTKALYVHKDGGISQFIGDKLKPKTEYVIQYTVKGKPSIHLKDENTGYIHYEDTNNNLEDYQTINKRFTTGTDLKGVYLILKSQNGDEAWGDNFIILEISPSEKLLSPELINTNNWTSTGSTNISGNTLTLYQGGRGILKQNLQLDSFSTYRVYFSVSGDANVRIRNSREVLFEKRYMSGAKDVSEMFTTKFEKDNFYIELSQGNNLYGGPIVHFYDVSIK

SEQ ID NO: 524 - protein, 790 aa, Bacillus thuringiensis; identical to SEQ ID NO: 513

SEQ ID NO: 525 - protein, 789 aa, Bacillus thuringiensis
MNKNNTKLSTRALPSFIDYFNGIYGFATGIKDIMNMIFKTDTGGDLTLDEILKNQQLLNDISGKLDGVNGSLNDLIAQGNLNTELSKEILKIANEQNQVLNDVNNKLDAINTMLRVYLPKITSMLSDVMKQNYALSLQIEYLSKQLQEISDKLDIINVNVLINSTLTEITPAYQRIKYVNEKFEELTFATETSSKVKKDGSPADILDELTELTELAKSVTKNDVDGFEFYLNTFHDVMVGNNLFGRSALKTASELITKENVKTSGSEVGNVYNFLIVLTALQAKAFLTLTTCRKLLGLADIDYTSIMNEHLNKEKEEFRVNILPTLSNTFSNPNYAKVKGSDEDAKMIVEAKPGHALIGFEISNDSITVLKVYEAKLKQNYQVDKDSLSEVIYGDMDKLLCPDQSEQIYYTNNIVFPNEYVITKIDFTKKMKTLRYEVTANFYDSSTGEIDLNKKKVESSEAEYRTLSANDDGVYMPLGVISETFLTPINGFGLQADENSRLITLTCKSYLRELLLATDLSNKETKLIVPPSGFISNIVENGSIEEDNLEPWKANNKNAYVDHTGGVNGTKALYVHKDGGISQFIGDKLKPKTEYVIQYTVKGKTSIHLKDENTGYIHYEDTNNNLEDYQTINKRFTTGTDLKGVYLILKSQNGDEAWGDNFIILEISPSEKLLSPELINTNNWTSTGSTNISGNTLTLYQGGRGILKQNLQLDSFSTYRVYFSVSGDANVRIRNSREVLFEKRYMSGAKDVSEMFTTKFEKDNFYIELSQGNNLYGGPIVHFYDVSIK

SEQ ID NO: 526 - protein, 789 aa, Bacillus thuringiensis
MNKNNTKLNARALPSFIDYFNGIYGFATGIKDIMNMIFKTDTGGNLTLDEILKNQQLLNEISGKLDGVNGSLNDLIAQGNLNTELSKEILKIANEQNQVLNDVNNKLDAINTMLHIYLPKITSMLSDVMKQNYALSLQIEYLSKQLQEISDKLDIINVNVLINSTLTEITPAYQRIKYVNEKFEELTFATETTLKVKKDSSPADILDELTELTELAKSVTKNDVDGFEFYLNTFHDVMVGNNLFGRSALKTASELIAKENVKTSGSEVGNVYNFLIVLTALQAKAFLTLTTCRKLLGLADIDYTSIMNEHLNKEKEEFRVNILPTLSNTFSNPNYAKVKGSDEDAKMIVEAKPGYALVGFEMSNDSITVLKVYEAKLKQNYQVDKDSLSEVIYGDTDKLLCPDQSEQIYYTNNIVFPNEYVITKIDFTKKMKTLRYEVTANFYDSSTGEIDLNKKKVESSEAEYRTLSANDDGVYMPLGVISETFLTPINGFGLQADGNSRLITLTCKSYLRELLLATDLSNKETKLIVPPSGFISNIVENGSIEEDNLEPWKANNKNAYVDHTGGVNGTKALYVHKDGGFSQFIGDKLKPKTEYVIQYTVKGKPSIHLKDENTGYIHYEDTNNNLKDYQTITKRFTTGTDLKGVYLILKSQNGDEAWGDNFIILEISPSEKLLSPELINTNNWTSTGSTHISGNTLTLYQGGRGILKQNLQLDSFSTYRVYFSVSGDANVRIRNSREVLFEKRYMSGAKDVSEMFTTKFEKDNFYIELSQGNNLYGGPIVHFYDVSIK

SEQ ID NO: 527 - protein, 789 aa, Bacillus thuringiensis; identical to SEQ ID NO: 508

SEQ ID NO: 528 - protein, 789 aa, Bacillus thuringiensis
MNKNNTKLSTRALPSFIDYFNGIYGFATGIKDIMNMIFKTDTGGDLTLDEILKNQQLLNDISGKLDGVNGSLNDLIAQGNLNTELSKEILKIANEQNQVLNDVNNKLDAINTMLRVYLPKITSMLSDVIKQNYALSLQIEYLSKQLQEISDKLDIINVNVLINSTLTEITPAYQRIKYVNEKFEELTFATETSSKVKKDGSPADILDELTELTELAKSVTKNDVDGFEFYLNTFHDVMVGNNLFGRSALKTASELITKENVKTSGSEVGNVYNFLIVLTALQAQAFLTLTTCRKLLGLADIDYTSIMNEHLNKEKEEFRVNILPTLSNTFSNPNYAKVKGSDEDAKMIVEAKPGHALIGFEISNDSITVLKVYEAKLKQNYQVDKDSLSEVIYGDMDKLLCPDQSEQIYYTNNIVFPNEYVITKIDFTKKMKTLRYEVTANFYDSSTGEIDLNKKKVESSEAEYRTLSANDDGVYMPLGVISETFLTPINGFGLQADENSRLITLTCKSYLRELLLATDLSNKETKLIVPPSGFISNIVENGSIEEDNLEPWKANNKNAYVDHTGGVNGTKALYVHKDGGISQFIGDKLKPKTEYVIQYTVKGKPSIHLKDENTGYIHYEDTNNNLEDYQTINKRFTTGTDLKGVYLILKSQNGDEAWGDNFIILEISPSEKLLSPELINTNNWTSTGSTNISGNTLTLYQGGRGILKQNLQLDSFSTYRVYFSVSGDANVRIRNSREVLFEKRYMSGAKDVSEMFTTKFEKDNFYIELSQGNNLYGGPIVHFYDVSIK

SEQ ID NO: 529 - protein, 789 aa, Bacillus thuringiensis; identical to SEQ ID NO: 514

SEQ ID NO: 530 - protein, 789 aa, Bacillus thuringiensis
MNKNNTKLSTRALPSFIDYFNGIYGFATGIKDIMNMIFKTDTGGDLTLDEILKNQQLLNDISGKLDGVNGSLNDLIAQGNLNTELSKEILKIANEQNQVLNDVNNKLDAINTMLRVYLPKITSMLSDVMKQNYALSLQIEYLSKQLQEISDKLDIINVNVLINSTLTEITPAYQRIKYVNEKFEELTFATETSSKVKKDGSPADILDELTELTELAKSVTKNDVDGFEFYLNTFHDVMVGNNLFGRSALKTASELITKENVKTSGSEVGNVYNFLIVLTALQAKAFLTLTTCRKLLGLADIDYTSIMNEHLNKEKEEFRVNILPTLSNTFSNPNYAKVKGSDEDAKMIVEAKPGHALIGFEISNDSITVLKVYEAKLKQNYQVDKDSLSEVIYGDMDKLLCPDQSEQIYYTNNIVFPNGYVITKIDFTKKMKTLRYEVTANFYDSSTGEIDLNKKKVESSEAEYRTLSANDDGVYMPLGVISETFLTPINGFGLQADENSRLITLTCKSHLRELLLATDLSNKETKLIVPPSGFISNIVENGSIEEDNLEPWKANNKNAYVDHTGGVNGTKALYVHKDGGISQFIGDKLKPKTEYVIQYTVKGKPSIHLKDENTGYIHYEDTNNNLEDYQTINKRFTTGTDLKGVYLILKSQNGDEAWGDNFIILEISPSEKLLSPELINTNNWTSTGSTNISGNTLTLYQGGRGILKQNLQLDSFSTYRVYFSVSGDANVRIRNSREVLFEKRYMSGAKDVSEMFTTKFEKDNFYIELSQGNNLYGGPIVHFYDVSIK

SEQ ID NO: 531 - protein, 789 aa, Bacillus thuringiensis
MNKNNTKLSTRALPGFIDYFNGIYGFATGIKDIMNMIFKTDTGGDLTLDEILKNQQLLNDISGKLDGVNGSLNDLIAQGNLNTELSKEILKIANEQNQVLNDVNNKLDAINTMLRVYLPKITSMLSDVMKQNYALSLQIEYLSKQLQEISDKLDIINVNVLINSTLTEITPAYQRIKYVNEKFEELAFATETSSKVKKDGSPADILDELTELTELAKSVTKNDVDGFEFYLNTFHDVMVGNNLFGRSALKTASELITKENVKTSGSGVGNVYNFLIVLTALQAKAFLTLTTCRKLLGLADIDYTSIMNEHLNKEKEEFRVNILPTLSNTFSNPNYAKVKGSDEDAKMIVEAKPGHALIGFEISNDSITVLKVYEAKLKQNYQVDKDSLSEVIYGDMDKLLCPDQSEQIYYTNNIVFPNEYVITKIDFTKKMKTLRYEVTANFYDSSTGEIDLNKKKVESSEAEYRTLSANDDGVYMPLGVISETFLTPINGFGLQADENSRLITLTCKSYLRELLLATDLSNKETKLIVPPSGFISNIVENGSIEEDNLEPWKANNKNAYVDHTGGVNGTKALYVHKDGGISQFIGDKLKPKTEYVIQYTVKGKPSIHLKDENTGYIHYEDTNNNLEDYQTINKRFTTGTDLKGVYLILKSQNGDEAWGDNFIILEISPSEKLLSPELINTNNWTSTGSTNISGNTLTLYQGGRGILKQNLQLDSFSTYRVYFSVSGDANVRIRNSREVLFEKRYMSGAKDVSEMFTTKFEKDNFYIELSQGNNLYGGPIVHFYDVSIK

SEQ ID NO: 532 - protein, 803 aa, Bacillus thuringiensis; identical to SEQ ID NO: 484

SEQ ID NO: 533 - protein, 789 aa, Bacillus thuringiensis
MNKNNTKLSTRALPSFIDYFNGIYGFATGIKDIMNMIFKTDTGGDLTLDEILKNQQLLNDISGKLDGVNGSLNDLIAQGNLNTKLSKEILKIANEQNQVLNDVNNKLDAINTMLRVYLPKITSMLSDVMKQNYALSLQIKYLSKQLQEISDKLDIINVNVLINSTLTEITPAYQRIKYVNEKFEELTFATETSSKVKKDGSPADILDELTELTELAKSVTKNDVDGFEFYLNTFHDVMVGNNLFGRSALKTASELITKENVKTSGSEVGNVYNFLIVLTALQAKAFLTLTTCRKLLGLADIDYTSIMNEHLNKEKEEFRVNILPTLSNTFSNPNYAKVKGSDEDAKMIVEAKPGHALIGFEISNDSITVLKVYEAKLKQNYQADKDSLSEVIYGDMDKLLCPDQSEQIYYTNNIVFPNEYVITKIDFTKKMKTLRYEVTANFYDSSTGEIDLNKKKVESSEAEYRTLSANDDGVYMPLGVISETFLTPINGFGLQADENSRLITLTCKSYLRELLLATDLSNKETKLIVPPSGFISNIVENGSIEEDNLEPWKANNKNAYVDHTGGVNGTKALYVHKDGGISQFIGDKLKPKTEYVIQYTVKGKPSIHLKDENTGYIHYEDTNNNLEDYQTINKRFTTGTDLKGVYLILKSQNGDEAWGDNFIILEISPSEKLLSPELINTNNWTSTGSTNISGNTLTLYQGGRGILKQNLQLDSFSTYRVYFSVSGDANVRIRNSREVLFEKRYMSGAKDVSEMFTTKFEKDNFYIELSQGNNLYGGPIYHLHDVSIK

SEQ ID NO: 534 - protein, 789 aa, Bacillus thuringiensis
MNKNNTKLSTRALPSFIDYFNGIYGFATGIKDIMNMIFKTDTGGDLTLDEILKNQQLLNDISGKLDGVNGSLNDLIAQGNLNTELSKEILRIANEQNQVLNDVNNKLDAINTMLRVYLPKITSMLSDVMKQNYALSLQIEYLSKQLQEISDKLDIINVNVLINSTLTEITPAYQRIKYVNEKFEELTFATETSSKVKKDGSPADILDELTELTELAKSVTKNDVDGFEFYLNTFHDVMVGNNLFGRSALKTASELITKENVKTSGSEVGNVYNFLIVLTALQAKAFLTLTTCRKLLGLADIDYTSIMNEHLNKEKEEFRVNILPTLSNTFSNPNYAKVKGSNEDAKMIVEAKPGHALIGFEISNDSITVLKVYEAKLKQNYQVDKDSLSEVIYGDMDKLLCPDQSEQIYYTNNIVFPNEYVITKIDFTKKMKTLRYEVTANFYDSSTGEIDLNKKKVESSEAEYRTLSANDDGVYMPLGVISETFLTPINEFGLQADENSRLITLTCKSYLREPLLATDLSNKETKLIVPPSGFISNIVENGSIEEDNLEPWKANNKNAYVDHTGGVNGTKALYVHKDGGISQFIGDKLKPKTEYVIQYTVKGKPSIRLKDENTGYIHYEDTNNNLEDYQTINKRFTTGADLKGVYLILKSQNGDEAWGDNFIILEISPSEKLLSPELINTNNWTSTGSTNISGNTLTLYQGGRGILKQNLQLDSFSTYRVYFSVSGDANVRIRNSREVLFEKRYMSGAKDVSEMFTTKFEKDNFYTELSQGNNLYGGPIVHFYDVSIK

SEQ ID NO: 535 - protein, 789 aa, Bacillus thuringiensis
MNKNNTKLSTRALPSFIDYFNGIYGFATGIKDIMNMIFKTDTGGDLTLDEILKNQQLLNDISGKLDGVNGSLNDLIAQGNLNTELSKEILKIANEQNQVLNDVNNKLDAINTMLRVYLPKITSMLSDVMKQNYALSLQIEYLSKQLQEISDKLDIINVNVLINSTLTEITPAYQRIKYVNEKFEELTFATETSSKVKKDGSPADILDELTELTELAKSVTKNGVDGFEFYLNTFHDVMVGNNLFGRSALKTASELITKENVKTSGSEVGNVYNFLIVLTALQAKAFLTLTTCRKLLGLADIDYTSIMNEHLNKEKEEFRVNILPTLSNTFSNPNYAKVKGSDEDAKMIVEAKPGHALIGFEISNDSITVLKVYEAKLKQNYQVDKDSLSEVIYGDMDELLCPDQSEQIYYTNNIVFPNEYVITKIDFTKKMKTLRYEVTANFYDSSTGEIDLNKKKVESSEAEYRTLSANDDGVYMPLGVISETFLTPINGFGLQADENSRLITLTCKSYLRELLLATDLSNKETKLIVPPSGFISNIVENGSIEEDNLEPWKANNKNAYVDHTGGVNGTKALYVHKDGGISQFIGDKLKPKTEYVIQYTVKGKPSIHLKDENTGYIHYEDTNNNLEDYQTINKRFTTGTDLKGVYLILKSQNGDEAWGDNLIILEISPSEKLLSPELINTNNWTSTGSTNISGNTLTLYQGGRGILKQNLQLDSLSTYRVYFSVSGDANVRIRNSREVLFEKRYMSGAKDVSEMFTTKFEKDNFYIELSQGNNLYGGPIVHFYDVSIK

SEQ ID NO: 536 - protein, 789 aa, Bacillus thuringiensis
MNKNNTKLSTRALPSFIDYFNGIYGFATGIKDIMNMIFKTDTGGDLTLDEILKNQQLLNDISGKLDGVNGSLNDLIAQGNLNTELSKEILKIANEQNQVLNDVNNKLDAINTMLRVYLPKITSMLSDVMKQNYALSLQIEYLSKQLQEISDKLDIINVNVLINSTLTEITPAYQRIKYVNEKFEELTFATETSSKVKKDGSPADILDELTELTELAKSVTKNDVDGFEFYLNTFHDVMVGNNLFGHSALKTASELITKENVKTSGSEVGNVYNFLIVLTALQAKAFLTLTTCRKLLGLADIDYTSIMNEHLNKEKEEFRVNILPTLSNTFSNPNYAKVKGSDEDAKMIVEAKPGHALIGFEISNDSITVLKVYEAKLKQNYQVDKDSLSEVIYGDMDKLLCPDQSEQIYYTNNIVFPNEYVITKIDFTKKMKTLRYEVTANFYDSSTGEIDLNKKKVESSEAEYRTLSANDDGVYMPLGVISETFLTPINGFGLQADENSRLITLTCKSYLRELLLATDLSNKETKLIVPPSGFISNIVENGSIEEDNLEPWKANNKNAYVDHTGGVNGTKALYVHKDGGISQFIGDKLKPKTEYVIQYTVKGKPSIHLKDENTGYIHYEDTNNNLEDYQTINKRFTTGTDLKGVYLILKSQNGDEAWGDNFIILEISPSEKLLSPELINTNNWTSTGSTNISGNTLTLYQGGRGILKQNLQLDSFSTYRVYFSVSGDANVRIRNSREVLFEKRYMSGAKDVSEMFTTKFEKDNFYIELSQGNNLYGGPIVHFYDVSIS

SEQ ID NO: 537 - protein, 788 aa, Bacillus thuringiensis
MNKNNTKLSNFRCLYLVEYFNGIYGFATGIKDIMNMIFKTDTGGDLTLDEILKNQQLLNDISGKLDGVNGSLNDLIAQGNLNTELSKEILKIANEQNQVLNDVNNKLDAINTMLRVYLPKITSMLSDVMKQNYALSLQIEYLSKQLQEISDKLDIINVNVLINSTLTEITPAYQRIKYVNEKFEELTFATETSSKVKKDGSPADILDELTELTELAKSVTKNDVDGFEFYLNTFHDVMVGNNLFGRSALKTASELITKENVKTSGSEVGNVYNFLIVLTALQAKAFLTLTTCRKLLGLADIDYTSIMNEHLNKEKEEFRVNILPTLSNTFSNPNYAKVKGSDEDAKMIVEAKPGHALIGFEISNDSITVLKVYEAKLKQNYQVDKDSLSEVIYGDMDKLLCPDQSEQIYYTNNIVFPNEYVITKIDFTKKMKTLRYEVTANFYDSSTGEIDLNKKKVESSEAEYRTLSANDDGVYMPLGVISETFLTPINGFGLQADENSRLITLTCKSYLRELLLATDLSNKETKLIVPPSGFISNIVENGSIEEDNLEPWKANNKNAYVDHTGGVNGTKALYVHKDGGISQFIGDKLKPKTEYVIQYTVKGKPSIHLKDENTGYIHYEDTNNNLEDYQTINKRFTTGTDLKGVYLILKSQNGDEAWGDNFIILEISPSEKLLSPELINTNNWTSTGSTNISGNTLTLYQGGRGILKQNLQLDSFSTYRVYFSVSGDANVRIRNSREVLFEKRYMSGAKDVSEMYTPKFEKDNFYIELLKAKNKNKLIALFYDVSIK

SEQ ID NO: 538 - protein, 787 aa, Bacillus thuringiensis
MNKNNTKLSHVVVISFIDYFNGIYGFATGIKDIMNMIFKTDTGGDLTLDEILKNQQLLNDISGKLDGVNGSLNDLIAQGNLNTELSKEILKIANEQNQVLNDVNNKLDAINTMLRVYLPKITSMLSDVMKQNYALSLQIEYLSKQLQEISDKLDIINVNVLINSTLTEITPAYQRIKYVNEKFEELTFATETSSKVKKDGSPADILDELTELTELAKSVTKNDVDGFEFYLNTFHDVMVGNNLFGRSALKTASELITKENVKTSGSEVGNVYNFLIVLTALQAKAFLTLTTCRKLLGLADIDYTSIMNEHLNKEKEEFRVNILPTLSNTFSNPNYAKVKGSDEDAKMIVEAKPGHALIGFEISNDSITVLKVYEAKLKQNYQVDKDSLSEVIYGDMDKLLCPDQSEQIYYTNNIVFPNEYVITKIDFTKKMKTLRYEVTANFYDSSTGEIDLNKKKVESSEAEYRTLSANDDGVYMPLGVISETFLTPINGFGLQADENSRLITLTCKSYLRELLLATDLSNKETKLIVPPSGFISNIVENGSIEEDNLEPWKANNKNAYVDHTGGVNGTKALYVHKDGGISQFIGDKLKPETEYVIQYTVKGKPSIHLKDENTGYIPYEDTNNNLEDYQTINKRFTTGTDLKGVYLILKSQNGDEAWGDNFIILEISPSEKLLSPELINTNNWTSTGSTNISGNTLTLYQGGRGILKQNLQLDSFSTYRVYFSVSGDANVRIRNSREVLFEKRYMSGAKDVSEMFTTKFEKDNFYIEPLKGITIWVNSPFYDVSIK

SEQ ID NO: 539 - protein, 788 aa, Bacillus thuringiensis
MNKNNTKLSNVNELSSLSDYFNGIYGFATGIKDIMNMIFKTDTGGDLTLDEILKNQQLLNDISGKLDGVNGSLNDLIAQGNLNTELSKEILKIANEQNQVLNDVNNKLDAINTMLRVYLPKITSMLSDVMKQNYALSLQIEYLSKQLQEISDKLDIINVNVLINSTLTEITPAYQRIKYVNEKFEELTFATETSSKVKKDGSPADILDELTELTELAKSVTKNDVDGFEFYLNTFHDVMVGNNLFGRSALKTASELITKENVKTSGSEVGNVYNFLIVLTALQAKAFLTLTTCRKLLGLADIDYTSIMNEHLNKEKEEFRVNILPTLSNTFSNPNYAKVKGSDEDAKMIVEAKPGHALIGFEISNDSITVLKVYEAKLKQNYQVDKDSLSEVIYGDMDKLLCPDQSEQIYYTNNIVFPNEYVITKIDFTKKMKTLRYEVTANFYDSSTGEIDLNKKKVESSEAEYRTLSANDDGVYMPLGVISETFLTPINGFGLQADENSRLITLTCKSYLRELLLATDLSNKETKLIVPPSGFISNIVENGSIEEDNLEPWKANNKNAYVDHTGGVNGTKALYVHKDGGISQFIGDKLKPKTEYVIQYTVKGKPSIHLKDENTGYIHYEDTNNNLEDYQTINKRFTTGTDLKGVYLILKSQNGDEAWGDNFIILEISPSEKLLSPELINTNNWTSTGSTNISGNTLTLYQGGRGILKQNLQLDSFSTYRVYFSVSGDANVRIRNSREVLFEKRYMSGAKDVSEMFTTKFEKDNFYIELLKGRTRIDLSPFYDVSIK

SEQ ID NO: 540 - protein, 788 aa, Bacillus thuringiensis
MNKNNTKLSKNELSRLSDYFNGIYGFATGIKDIMNMIFKTDTGGDLTLDEILKNQQLLNDISGKLDGVNGSLNDLIAQGNLNTELSKEILKIANEQNQVLNDVNNKLDAINTMLRVYLPKITSMLSDVMKQNYALSLQIEYLSKQLQEISDKLDIINVNVLINSTLTEITPAYQRIKYVNEKFEELTFATETSSKVKKDGSPADILDELTELTELAKSVTKNDVDGFEFYLNTFHDVMVGNNLFGRSALKTASELITKENVKTSGSEVGNVYNFLIVLTALQAKAFLTLTTCRKLLGLADIDYTSIMNEHLNKEKEEFRVNILPTLSNTFSNPNYAKVKGSDEDAKMIVEAKPGHALIGFEISNDSITVLKVYEAKLKQNYQVDKDSLSEVIYGDMDKLLCPDQSEQIYYTNNIVFPNEYVITKIDFTKKMKTLRYEVTANFYDSSTGEIDLNKKKVESSEAEYRTLSANDDGVYMPLGVISETFLTPINGFGLQADENSRLITLTCKSYLRELLLATDLSNKETKLIVPPSGFISNIVENGSIEEDNLEPWKANNKNAYVDHTGGVNGTKALYVHKDGGISQFIGDKLKPKTEYVIQYTVKGKPSIHLKDENTGYIHYEDTNNNLEDYQTINKRFTTGTDLKGVYLILKSQNGDEAWGDNFIILEISPSEKLLSPELINTNNWTSTGSTNISGNTLTLYQGGRGILKQNLQLDSFSTYRVYFSVSGDANVRIRNSREVLFEKRYMSGAKDVSEMFTTKFEKDNFYIELSQGKNKNRLNGPFYDVSIK

SEQ ID NO: 541 - protein, 789 aa, Bacillus thuringiensis; identical to SEQ ID NO: 514

SEQ ID NO: 542 - protein, 789 aa, Bacillus thuringiensis; identical to SEQ ID NO: 514

SEQ ID NO: 543 - protein, 789 aa, Bacillus thuringiensis
MNKNNTKLSTRALPSFIDYFNGIYGFATGIKDIMNMIFKTDTGGDLTLDEILKNQQLLNDISGKLDGVNGSLNDLIAQGNLNTELSKEILKIANEQNQVLNDVNNKLDAINTMLRVYLPKITSMLSDVMKQNYALSLQIEYLSKQLQEISDKLDIINVNVLINSTLTEITPAYQRIKYVNEKFEELTFATETSSKVKKDGSPADILDELTELTELAKSVTKNDVDGFEFYLNTFHDVMVGNNLFGRSALKTASELITKENVKTSGSEVGNVYNFLIVLTALQAKAFLTLTTCRKLLGLADIDYTSIMNEHLNKEKEEFRVNILPTLSNTFSNPNYAKVKGSDEDAKMIVEAKPGHALVGFEISNDSITVLKVYEAKLKQNYQVDKDSLSEVIYGDMDKLLCPDQSEQIYYTNNIVFPNEYVITKIDFTKKMKTLRYEVTANFYDSSTGEIDLNKKKVESSEAEYRTLSANDDGVYMPLGVISETFLTPINGFGLQADENSRLITLTCKSYLRELLLATDLSNKETKLIVPPSGFIKNIVENGSIEEDNLEPWKANNKNAYVDHTGGVNGTKALYVHKDGGISQFIGDKLKPKTEYVIQYTVKGKPSIHLKDENTGYIHYEDTNNNLEDYQTITKRFTTGTDLKGVYLILKSQNGDEAWGDNFIILEISPSEKLLSPELINTNNWTSTGSTNISGNTLTLYQGGRGILKQNLQLDSFSTYRVYFSVSGDANVRIRNSREVLFEKRYMSGAKDVSEIFTTKLGKDNFYIELSQGNNLNGGPIVKFSDVSIK

SEQ ID NO: 544 - protein, 789 aa, Bacillus thuringiensis; identical to SEQ ID NO: 514

SEQ ID NO: 545 - protein, 789 aa, Bacillus thuringiensis; identical to SEQ ID NO: 514

SEQ ID NO: 546 - protein, 789 aa, Bacillus thuringiensis
MNMNNTKLNARALPSFIDYFNGIYGFATGIKDIMNMIFKTDTGGDLTLDEILKNQQLLNDISGKLDGVNGSLNDLIAQGNLNTELSKEILKIANEQNQVLNDVNNKLDAINTMLRVYLPKITSMLSDVMKQNYALSLQIEYLSKQLQEISDKLDIINVNVLINSTLTEITPAYQRIKYVNEKFEELTFATETSSKVKKDGSPADILDELTELTELAKSVTKNDVDGFEFYLNTFHDVMVGNNLFGRSALKTASELITKENVKTSGSEVGNVYNFLIVLTALQAKAFLTLTTCRKLLGLADIDYTSIMNEHLNKEKEEFRVNILPTLSNTFSNPNYAKVKGSDEDAKMIVEAKPGHALVGFEVSNDSITVLKVYEAKLKQNYQVDKDFLSEVIYGDMDKLLCPDQSEQIYYTNNIVFPNEYVITKIDFTKKMKTLRYEVTANFYDSSTGEIDLNKKKVESSEAEYRTLSANDDGVYMPLGVISETFLTPINGFGLQADENSRLITLTCKSYLRELLLATDLSNKETKLIVPPSGFISNIVENGSIEEDNLEPWKANNKNAYVDHTGGVNGTKALYVHKDGGISQFIGDKLKPKTEYVIQYTVKGKPSIHLKDENTGYIHYEDTNNNLEDYQTITKRFTTGTDLKGVYLILKSQNGDEAWGDNFIILEISPSEKLLSPELINTNNWTSTGSTNISGNTLTLYQGGRGILKQNLQLDSFSTYRVYFSVSGDANVRIRNSREVLFEKRYMSGAKDVSEMFTTKFEKDNFYIELSQGNNLYGGPIVHFYDVSIK

SEQ ID NO: 547 - protein, 789 aa, Bacillus thuringiensis
MNMNNTKLNARALPSFIDYFNGIYGFATGIKDIMNMIFKTDTGGNLTLDEILKNQQLLNEISGKLDGVNGSLNDLIAQGNLNTELSKEILKIANEQNQVLNDVNNKLDAINTMLHIYLPKITSMLSDVMKQNYALSLQIEYLSKQLQEISDKLDIINVNVLINSTLTEITPAYQRIKYVNEKFEELTFATETTLKVKKDSSPADILDELTELTELAKSVTKNDVDGFEFYLNTFHDVMVGNNLFGRSALKTASELIAKENVKTSGSEVGNVYNFLIVLTALQAKAFLTLTTCRKLLGLADIDYTSIMNEHLNKEKEEFRVNILPTLSNTFSNPNYAKVKGSDEDAKMIVEAKPGHALVGFEMSNDSITVLKVYEAKLKQNYQVDKDSLSEVIYGDMDKLLCPDQSEQIYYTNNIVFPNEYVITKIDFTKKMKTLRYEVTANSYDSSTGEIDLNKKKVESSEAEYRTLSAKDDGVYMPLGVISETFLTPINGFGLQADENSRLITLTCKSYLRELLLATDLSNKETKLIVPPSGFISNIVENGNLEGENLEPWIANNKNAYVDHTGGVNGTRALYVHKDGGFSQFIGDKLKPKTEYVIQYTVKGKPSIHLKNENTGYIHYEDTNNNLEDYQTITKRFTTGTDLKGVYLILKSQNGDEAWGDNFTILEISPSEKLLSPELINVNNWIRTGSTHISGNTLTLYQGGGGNLKQNLQLDSFSTYRVNFSVTGDANVRIRNSREVLFEKRYMSGAKDVSEIFTTKLGKDNFYIELSQGNNLYGGPLVKFNDVSIK

SEQ ID NO: 548 - protein, 789 aa, Bacillus thuringiensis
MNKNNTKLSARALPSFIDYFNGIYGFATGIKDIMNMIFKTDTGGNLTLDEILKNQQLLNEISGKLDGVNGSLNDLIAQGNLNTELSKEILKIANEQNQVLNDVNNKLDAINTMLHIYLPKITSMLSDVMKQNYALSLQIEYLSKQLQEISDKLDIINVNVLINSTLTEITPAYQRIKYVNEKFEELTFATETTLKVKKDSSPADILDELTELTELAKSVTKNDVDGFEFYLNTFHDVMVGNNLFGRSALKTASELIAKENVKTSGSEVGNVYNFLIVLTALQAKAFLTLTTCRKLLGLADIDYTSIMNEHLNKEKEEFRVNILPTLSNTFSNPNYAKVKGSDEDAKMIVEAKPGHALVGFEMSNDSITVLKVYEAKLKQNYQVDKDSLSEVIYGDMDKLLCPDQSEQIYYTNNIVFPNEYVITKIDFTKKMKTLRYEVTANSYDSSTGEIDLNKKKVESSEAEYRTLSAKDDGVYMPLGVISETFLTPINGFGLQADENSRLITLTCKSYLRELLLATDLSNKETKLIVPPSGFISNIVENGNLEGENLEPWIANNKNAYVDHTGGVNGTRALYVHKDGGFSQFIGDKLKPKTEYVIQYTVKGKPSIHLKNENTGYIHYEDTNNNLEDYQTITKRFTTGTDLKGVYLILKSQNGDEAWGDNFTILEISPSEKLLSPELINVNNWIRTGSTHISGNTLTLYQGGGGNLKQNLQLDSFSTYRVNFSVTGDANVRIRNSREVLFEKRYMSGAKDVSEIFTTKLGKDNFYIELSQGNNLYGGPLVHFYDVSIK

SEQ ID NO: 549 - protein, 789 aa, Bacillus thuringiensis
MNMNNTKLSARALPSLIDYFNGIYGFATGIKDIMNMIFKTDTGGNLTLDEILKNQQLLNEISGKLDGVNGSLNDLIAQGNLNTELSKEILKIANEQNQVLNDVNNKLDAINTMLHIYLPKITSMLSDVMKQNYALSLQIEYLSKQLQEISDKLDIINVNVLINSTLTEITPAYQRIKYVNEKFEELTFATETTLKVKKDSSPADILDELTELTELAKSVTKNDVDGFEFYLNTFHDVMVGNNLLGRSALKTASELIAKENVKTSGSEVGNVYNFLIVLTALQAKAFLTLTTCRKLLGLADIDYTSIMNEHLNKEKEEFRVNILPTLSNTFSNPNYAKVKGSDEDAKMIVEAKPGHALVGFEMSNDSITVLKVYEAKLKQNYQVDKDSLSEVIYGDMDKLLCPDQSEQIYYTNNIVFPNEYVITKIDFTKKMKTLRYEVTANSYDSSTGEIDLNKKKVESSEAEYRTLSAKDDGVYMPLGVISETFLTPINGFGLQADENSRLITLTCKSYLRELLLATDLSNKETKLIVPPSGFISNIVENGNLEGENLEPWIANNKNAYVDHTGGVNGTRALYVHKDGGFSQSIGDKLKPKTEYVIQYTVKGKPSIHLKNENTGYIHYEDTNNNLEDYQTITKRFTTGTDLKGVYLILKSQNGDEAWGDNFTILEISPSEKLLSPELINVNNWIRTGSTHISGYTLTLYQGGGGNLKQNLQLDSFSTYRVNFSVTGDANVRIRNSREVLFEKRYMSGAKDVSEIFTTKLGKDNFYIELSQGNNLYGGPLVHFYDVSIK

SEQ ID NO: 550 - protein, 789 aa, Bacillus thuringiensis
MNKNNTKLSTRALPSFIDYFNGIYGFATGIKDIMNMIFKTDTGGDLTLDEILKNQQLLNDISGKLDGVNGSLNDLIAQGNLNTELSKEILKIANEQNQVLNDVNNKLDAINTMLRVYLPKITSMLSDVMKQNYALSLQIEYLSKQLQEISDKLDIINVNVLINSTLTEITPAYQRIKYVNEKFEELTFATETSSKVKKDGSPADILDELTELTELAKSVTKNDVDGFEFYLNTFHDVMVGNNLFGRSALKTASELITKENVKTSGSEVGNVYNFLIVLTALQAKAFLTLTTCRKLLGLADIDYTSIMNEHLNKEKEEFRVNILPTLSNTFSNPNYAKVKGSDEDAKMIVEAKPGHALVGFEISNDSITVLKVYEAKLKQNYQVDKDSLSEVIYGDMDKLLCPDQSEQIYYTNNIVFPNEYVITKIDFTKKMKTLRYEVTANFYDSSTGEIDLNKKKVESSEAEYRTLSANDDGVYMPLGVISEAFLTPINGFGLQADENSRLITLTCKSYLRELLLATDLSNKETKLIVPPSGFIKNIVENGSIEEDNLEPWKANNKNAYVDHTGGVNGTKALYVHKDGGISQFIGDKLKPKTEYVIQYTVKGKPSIHLKDENTGYIHYEDTNNNLEDYQTITKRFTTGTDLKGVYLILKSQNGDEAWEDNFIILEISPSEKLLSPELINTNNWTSTGSTNISGNTLTLYQGGRGILKQNLQLDSFSTYRVYFSVSGDANVRIRNSREVLFEKRYMSGAKDVSEIFTTKLGKDNFYIELSQGNNLNGGPIVKFSDVSIK

SEQ ID NO: 551 - protein, 789 aa, Bacillus thuringiensis; identical to SEQ ID NO: 514

SEQ ID NO: 552 - protein, 789 aa, Bacillus thuringiensis; identical to SEQ ID NO: 514

SEQ ID NO: 553 - protein, 789 aa, Bacillus thuringiensis
MNKNNTKLSTRALPSFIDYFNGIYGFATGIKDIINMIFKTDTGGDLTLDEILKNQQLLNDISGKLDGVNGSLNDLIAQGNLNTELSKEILKIANEQNQVLNDVNNKLDAINTMLRVYLPKITSMLSDVMKQNYALSLQIEYLSKQLQEISDKLDIINVNVLINSTLTEITPAYQRIKYVNEKFEELTFATETSSKVKKDGSPADILDELTELTELAKSVTKNDVDGFEFYLNTFHDVMVGNNLFGRSALKTASELITKENVKTSGSEVGNVYNFLIVLTALQAKAFLTLTTCRKLLGLADIDYTSIMNEHLNKEKEEFRVNILPTLSNTFSNPNYAKVKGSDEDAKMIVEAKPGHALIGFEISNDSITVLKVYEAKLKQNYQVDKDSLSEVIYGDMDKLLCPDQSEQIYYTNNIVFPNEYVITKIDFTKKMKTLRYEVTANFYDSSTGEIDLNKKKVESSEAEYRTLSANDDGVYMPLGVISETFLTPINGFGLQADENSRLITLTCKSYLRELLLATDLSNKETKLIVPPSGFISNIVENGSIEEDNLEPWKANNKNAYVDHTGGVNGTKALYVHKDGGISQFIGDKLKPKTEYVIQYTVKGKPSIHLKDENTGYIHYEDTNNNLEDYQTINKRFTTGTDLKGVYLILKSQNGDEAWGDNFIILEISPSEKLLSPELINTNNWTSTGSTNISGNTLTLYQGGRGILKQNLQLDSFSTYRVYFSVSGDANVRIRNSREVLFEKRYMSGAKDVSEMFTTKFEKDNFYIELSQGNNLYGGPIVHFYDVSIK

SEQ ID NO: 554 - protein, 803 aa, Bacillus thuringiensis; identical to SEQ ID NO: 484

SEQ ID NO: 555 - protein, 803 aa, Bacillus thuringiensis; identical to SEQ ID NO: 484

SEQ ID NO: 556 - protein, 788 aa, Bacillus thuringiensis
MNKNNTKLSTRALPSFIDYFNGVYGFATGIKDIMNMIFKTDTGGDLTLDEILKNQQLLNDISGKLDGVNGSLNDLIAQGNLNTELSKEILKIANEQNQVLNDVNNKLDAINTMLRVYPPKITSMLSDVMKQNYALSLQIEYLSKQLQEISDKLDIINVNVLINSTLTEITPAYQRIKYVNEKFEELTFATETSSKVKRDGSPADILDELTELTELAKSVTKNDVDGFEFYLNTFHDVMVGNNLFGRSALKTASELITKENVKTSGSEVGNVYNFLIVLTALQAKAFLTLTTCRKLLGLADIDYTSIMNEHLNKEKEEFRVNILPTLSNTFSNPNYAKVKGSDEDAKMIVEAKPGHALIGFEISNDSITVLKVYEAKLKQNYQVDKDSLSEVIYGDMDKLLCPDQSEQIYYTNNIVFPNEYVITKIDFTKKMKTLRYEVTANLYDSSTGEIDLNKKKVESSEAEYRTLSANDDGVYMPLGVISETFLTPINGFGLQADENSRLITLTCKSYLRELLLATDLSNKETKLIVPPSGFISNIVENGSIEEDNLEPWKANNKNAYVDHTGGVNGTKALYVHKDGGISQFIGDKLKPKTKYVIQYTVKGKPSIHLKDENTGYIHYEDTNNNLEDYQTINKRFTTGTDLKGVYLILKSQNGDEAWGDNFIILEISPSEKLLSPELINTNNWTSTGSTNISGNTLTLYQGGRGILKQNLQLDSFSTYRVYFSVSGDANVRIRNSREVLFEKRYMSGAKDVSEMFTTKFEKDNFYIELSQGNNLYGGPIVHFYDVSI

SEQ ID NO: 557 - protein, 788 aa, Bacillus thuringiensis
MNKNNTKLSTRALPSFIDYFNGIYGFATGIKDIMNMIFKTDTGGDLTLDEILKNQQLLNDISGKLDGVNGSLNDLIAQGNLNTELSKEILKIANEQNQVLNDVNNKLDAINTMLRVYLPKITSMLSDVMKQNYALSLQIEYLSKQLQEISDKLDIINVNVLINSTLTEITPAYQRIKYVNEKFEELTFATETSSKVKKDGSPADILDELTELTELAKSVTKNDVDGFEFYLNTFHDVRVGNNLFGRSALKTASELITKENVKTSGSEVGNVYNFLIVLTALQAKAFLTLTTCRKLLGLADIDYTSIMNEHLSKEKEEFRVNILPTLSNTFSNPNYAKVKGSDEDAKMIVEAKPGHALIGFEISNDSITVLKVYEAKLKQNYQVDKDSLSEVIYGDMDKLLCPDQSEQIYYTNNIVFPNEYVITKIDFTKKMKTLRYEVTANFYDSSTGEIDLNKKKVESSEAEYRTLSANDDGVYMPLGVISETFLTPINGFGLQADENSRLITLTCKSYLRELLLATDLSNKETKLIVPPSGFISNIVENGSIEEDNLEPWKANNKNAYVDHTGGVNGTKALYVHKDGGISQFIGDKLKPKTEYVTQYTVKGKPSIHLKDENTGYIHYEDTNNNLEDYQTINKRFTTGTDLKGVYLILKSQNGDEAWGDNFIILEISPSEKSLSPELINTNNWTSTGSTNISGNTLTLYQGGRGILKQNLQLDSFSTYRVYFSVSGDANVRIRNSREVLFEKRYMSGAKDVSEMFTTKFEKDNFYIELSQGNNLYGGPIVHFYDVSI

SEQ ID NO: 558 - protein, 803 aa, Bacillus thuringiensis; identical to SEQ ID NO: 484

SEQ ID NO: 559 - protein, 803 aa, Bacillus thuringiensis; identical to SEQ ID NO: 484

SEQ ID NO: 560 - protein, 787 aa, Bacillus thuringiensis
MNMNNTKLNARALPSFIDYFNGIYGFATGIKDIMNMIFKTDTGGNLTLDEILKNQQLLNEISGKLDGVNGSLNDLIAQGNLNTELSKEILKIANEQNQVLNDVNNKLDAINTMLHIYLPKITSMLSDVMKQNYALSLQVEYLSKQLKEISDKLDVINVNVLINSTLTEITPAYQRIKYVNEKFEELTFATETTLKVKKDSSPADILDELTELTELAKSVTKNDVDGFEFYLNTFHDVMVGNNLFGRSALKTASELIAKENVKTSGSEVGNVYNFLIVLTALQAKAFLTLTTCRKLLGLADIDYTSIMNEHLNKEKEEFRVNILPTLSNTFSNPNYAKVKGSDEDAKMIVEAKPGHALVGFEISNDSMTVLKVYEAKLKQNYQVDKDSLSEVIYSDMDKLLCPDQSEQIYYTNNIVFPNEYVITKIDFTKKMKTLRYEVTANSYDSSTGEIDLNKKKVESSEAEYRTLSANNDGVYMPLGVISETFLTPINGFGLQADENSRLITLTCKSYLRELLLATDLSNKETKLIVPPISFISNIVENGNLEGENLEPWIANNKNAYVDHTGGINGTKVLYVHKDGEFSQFVGGKLKSKTEYVIQYIVKGKASIYLKDKKNENSIYEEINNDLEGFQTVTKRFITGTDSSGIHLIFTSQNGEGAFGGNFIISEIRTSEELLSPELIMSDAWVGSQGTWISGNSLTINSNVNGTFRQNLPLESYSTYSMNFTVNGFGKVTVRNSREVLFEKSYPQLSPKDISEKFTTAANNTGLYVELSRSTSGGAINFRDFSIK

SEQ ID NO: 561 - protein, 787 aa, Bacillus thuringiensis; identical to SEQ ID NO: 560

SEQ ID NO: 562 - protein, 786 aa, Bacillus thuringiensis
MQKNNKLSVKALPSFIDYFNGIYGFATGIKDIMNMIFKTNTGGDLTLDEILKNQQLLNEISGKLDGVNGSLNDLLAQGNLDTELSKEILKIANEQNKVLNDVNTKLDAINLMLNTYLPKITSMLSDVMKQNYALGLQIEYLSKQLKEISDKLDVINVNVLINSTLTEITPAYQRIKYVNEKFEALTSATETNLKTKQDSSHTDILDELTELTELAKSVTKNDVDGFEFYLNTFHDVMIGNNLFGRSALKTASELIAKENLKTSGSEVGNVYNFLIVLTALQAKAFLTLTTCRKLLGLADIDYTPIMNEHLNKEKEEFRVNILPTLSNTFSNPNYEKARGSDKDAKIIMEAKPGYALVGFEISKDSIAVLKVYQAKLKHNYQIDKDSLSEIVYGDIDKLLCPDQSEQMYYTNKIAFPNEYVITKIAFTKKLNSLRYEVTANFYDSSTGDIDLNKKKIESSEAEFSMLNANNDGVYMPIGTISETFLTPINGFGLVVDENSRLVTLTCKSYLRETLLATDLSNKETKLIVPPNGFISNIVENGNLEGENLEPWKANNKNAYVDHTGGVNGTKVLYVHEDGEFSQFIGDKLKLKTEYVIQYIVKGKAAIYLKDEKNGDYIYEETNNELEDFQAVTKRFITGTDSSRVHLIFTSQNGEEAFGGNFIISEIRPSEELLSPELIKSDAWVGSQGTWISGNSLNINSNVNGTFRQNLSLESYSTYSMNFNVNGFGKVTIRNSREVVFERSYLQFSSKYISEKFTTTTNNTGLYVELSRASSRGVINFGDFSIK

SEQ ID NO: 563 - protein, 786 aa, Bacillus thuringiensis
MNMNNTKLNARALPSFIDYFNGIYGFATGIKDIMNMIFKTDTGGNLTLDEILKNQQLLNEISGKLDGVNGSLNDLIAQGNLNTELAKQILKVANEQNQVLNDVNNKLDAINSMLKIYLPKITSMLSDVMKQNYVLSLQIEYLSKQLQEISDKLDIINVNVLINSTLTEITPAYQRIKYVNEKFDDLTFATENTLKVKKDSSPADILDELTELTELAKSVTKNDVDGFEFYLNTFHDVMVGNNLFGRSALKTASELIAKENVKTSGSEVGNVYNFLIVLTALQAKAFLTLTTCRKLLGLADIDYTSIMNEHLNKEKEEFRVNILPTLSNTFSNPNYAKAKGSNEDTKMIVEAKPGYVLVGFEMSNNSITVLKAYQAKLKKDYQIDKDSLSEIIYSDTDKLLCPDQSEQIYYTKNIAFPNEYVITKIAFTKKMNSLRYEATANFYDSSTGDIDLNKTKVESSEAEYSMLKASDDEVYMPLGLISETFLNPINGFRLAVDENSRLVTLTCRSYLRETLLATDLNNKETKLIVPPNVFISNIVENGNIEMDTLEPWKANNENANVDYSGGVNGTRALYVHKDGEFSHFIGDKLKSKTEYLIRYIVKGKASIFLKDEKNENYIYEDTNNNLEDYQTITKRFTTGTDSTGVYLIFNSQNGDEAWGDNFIILEISPCEKLLSPELIKTDKWISTGSTYISDDRLTLYQGGRGILKQNLQLDRFSTYRVNFSVNGDANVRIRNSREVLLEKRYLNRKGVSEMFTTKFDKDNFYVELSQGDNLGTVVHFYDFSIK

SEQ ID NO: 564 - protein, 786 aa, Bacillus thuringiensis
MNMNNAKLNARALPSFIDYFNGIYGFATGIKDIMNMIFKTDTGSNLTLDEILKNQQLLNEISGKLDGVNGSLNDLIAQGNLNTELAKQILKVANEQNQVLNDVNNKLDAINSMLKIYLPKITSMLSDVMKQNYVLSLQIEYLSKQLQEISDKLDIINVNVLINSTLTEITPAYQRMKYVNEKFEELTFATETTLKVKKDSPPADILDELTELTELAKSVTKNDVDGFEFYLNTFHDVMVGNNLFGRSALKTASELIAKENVKTSGSEVGNVYNFLIVLTALQAKAFLTLTTCRKLLGLADIDYTSIMNEHLNKEKEEFRVNILPTLSNTFSNPNYAKAKGSNEDTKMIVEAKPGYVLVGFEMSNDSITVLKAYQAKLKKDYQIDKDSLSEIIYSDTDKLLCPDQSEQIYYTKNIAFPNEYVITKIAFTKKMNSLRYEATANFYDSSTGDIDLNKTKVESSEAEYSMLKASDDEVYMPLGLISETFLNPINGFRLAVDENSRLVTLTCRSYLRETLLATDLNNKETKLIVPPNVFISNIVENGNIEMDTLEPWKANNENANVDYSGGVNGTRALYVHKDGEFSHFIGDKLKSKTEYLIRYIVKGKASIFLKDEKNENYIYEDTNNNLEDYQTITKRFTTGTDSTGVYLIFNSQNGDEAWGDNFIILEISPCEKLLSPELIKTDKWNSTGSTYISDDRLTLYRGGRGILKQNLQLDGFSTYRVNFSVDGDANVRIRNSREVLLEKRYLNRKGVSEMFTTKFDKDNFYVELSQGDNLGTIVHFYDFSIK

SEQ ID NO: 565 - protein, 787 aa, Bacillus thuringiensis
MNMNNTKLNARALPSFIDYFNGIYGFATGIKDIMNMIFKTDTGGNLTLDEILKNQQLLNEISGKLDGVNGSLNDLIAQGNLNTELSKEILKIANEQNQVLNDVNNKLDAINTMLHIYLPKITSMLSDVMKQNYALSLQIEYLSKQLQEISDKLDIINVNVLINSTLTEITPAYQRIKYVNEKFEELTFATETTLKVKEDGSPADILDELTELTELAKSVTKNEVDGFEFYLNTFHDVMVGNNLFGRSALKTASELIAKENVKTSGSEVGNVYNFLIVLTALQAKAFLTLTTCRKLLGLADIDYTSIMNEHLNKEKEEFRVNILPTLSNTFSNPNYVKAKGSDRDAKMIVEAKPGYALVGFEMSNDSMTVLKAYQAKLKQDYQVDKDSLSEIVYGDMNKLLCPDQSEQIYYTNNIAFPREYVITKLTFTKKMNSLRYEATANFYDSSTGDMDLNKTKVESSEAEYSRLSASNDGVYMPLGLISETFLTPINGFGLVVDENSRLVTLTCKSYLREILLATDLSNKETKLIVPPNGFISNIVENGNLEGENLEPWKANNKNAYIDHTGGVKGTKVLYVHKDGEFSQFIGYKLKSKTEYVIQYIVKGKAVIYLKDEKNGDYIYEEINNELEDFQTVTKRFITGTDSSGVHLIFTSQNGEEAFGGNFIISEIRPSEELLSPELIKSDAWVGTQGAWNSGNSLTIYTNTNGTFRQNLPLESYSTYSMNFNITGFGKVTIRNSREVLFEKNFSQLSPKDYSEKFTTAANNTGFYVELSRGTQGGNITFRDFSIK

SEQ ID NO: 566 - protein, 788 aa, Bacillus thuringiensis
MNMNNTKLNARALPSFIDYFNGIYGFATGIKDIMNMIFKTDTGGNLTLDEILKNQQLLNEISGKLDGVNGSLNDLIAQGNLNTELSKEILKIANEQNQVLNDVNNKLDAINTMLHIYLPKITSMLSDVMKQNYALSLQIEYLSKQLQEISDKLDIINVNVLINSTLTEITPAYQRIKYVNEKFEELTFATETTLKVKKDSSPADILDELTELTELAKSVTKNDVDGFEFYLNTFHDVMVGNNLFGRSALKTASELIAKENVKTSGSEVGNVYNFLIVLTALQAKAFLTLTTCRKLLGLADIDYTSIMNEHLNKEKEEFRVNILPTLSNTFSNPNYAKVKGSDEDAKMIVEAKPGHALVGFEMSNDSITVLKVYEAKLKQNYQVDKDSLSEVIYGDTDKLFCPDQSEQIYYTNNIVFPNEYVITKIDFTKKMKTLRYEVTANFYDSSTGEIDLNKKKVESSEAEYRTLSANDDGVYMPLGVISETFLTPINGFGLQADENSRLITLTCKSYLRELLLATDLSNKETKLIVPPSGFISNIVENGSIEEDNLEPWKANNKNAYVDHTGGVNGTKALYVHKDGGFSQFIGDKLKPKTEYVIQYTVKGKPSIHLKDENTGYIHYEDTNNNLKDYQTITKRFTTGTDLKGVYLILKSQNGDEAWGDKFTILEIKPAEDLLSPELINPNSWITTPGASISGNKLFINLGTNGTFRQSLSLNSYSTYSISFTASGPFNVTVRNSREVLFERSNLMSSTSHISGTFKTESNNTGLYVELSRRSGGGGHISFENVSIK

SEQ ID NO: 567 - protein, 787 aa, Bacillus thuringiensis
MNKNNTKLSTRALPSFIDYFNGIYGFATGIKDIMNMIFKTDTGGNLTLDEILKNQQLLNEISGKLDGVNGSLNDLIAQGNLNTELSKEILKIANEQNQVLNDVNNKLDAINTMLHIYLPKITSMLSDVMKQNYALSLQIEYLSKQLQEISDKLDIINVNVLINSTLTEITPAYQRIKYVNEKFEELTFATETTLKVKKDSSPADILDELTELTELAKSVTKNDVDGFEFYLNTFHDVMVGNNLFGRSALKTASELIAKENVKTSGSEVGNVYNFLIVLTALQAKAFLTLTTCRKLLGLAGIDYTSIMNEHLNKEKEEFRVNILPTLSNTFSNPNYAKVKGSDEDAKMIVEAKPGHALVGFEMSNDSITVLKVYEAKLKQNYQVDKDSLSEVIYGDTDKLFCPDQSEQIYYTNNIVFPNEYVITKIDFTKKMKTLRYEVTANFYDSSTGEIDLNKKKVESSEAEYRTLSANDDGVYMPLGVISETFLTPINGFGLQADENSRLITLTCKSYLRELLLATDLSNKETKLIVPPSGFISNIVENGSIEEDNLEPWKANNKNAYVDHTGGVNGTKALYVHKDGGFSQFIGDKLKPKTEYVIQYTVKGKPSIHLKDENTGYIHYEDTNNNLKDYQTITKRFTTGTDLKGVYLILKSQNGDEAWGDKFTILEIKPAEDLLSPELINPNSWITTPGASISGNKLFINLGTNGTFRQSLSLNSYSTYSISFTASGPFNVTVRNSRVLFERSNLMSSTSHISGTFKTESNNTGLYVELSRRSGGGGHISFENVSIK

SEQ ID NO: 568 - protein, 788 aa, Bacillus thuringiensis
MNKNNTKLSTRALPSFIDYFNGIYGFATGIKDIMNMIFKTDTGGDLTLDEILKNQQLLNDISGKLDGVNGSLNDLIAQGNLNTELSKEILKIANEQNQVLNDVNNKLDAINTMLRVYLPKITSMLSDVMKQNYALSLQIEYLSKQLQEISDKLDIINVNVLINSTLTEITPAYQRIKYVNEKFEELTFATETSSKVKKDGSPADILDELTELTELAKSVTKNDVDGFEFYLNTFHDVMVGNNLFGRSALKTASELITKENVKTSGSEVGNVYNFLIVLTALQAKAFLTLTTCRKLLGLADIDYTSIMNEHLNKEKEEFRVNILPTLSNTFSNPNYAKVKGSDEDAKMIVEAKPGHALIGFEISNDSITVLKVYEAKLKQNYQVDKDSLSEVIYGDMDKLLCPDQSEQIYYTNNIVFPNEYVITKIDFTKKMKTLRYEVTANFYDSSTGEIDLNKKKVESSEAEYRTLSANDDGVYMPLGVISETFLTPINGFGLQADENSRLITLTCKSYLRELLLATDLSNKETKLIVPPSGFISNIVENGSIEEDNLEPWKANNKNAYVDHTGGVNGTKALYVHKDGGISQFIGDKLKPKTEYVIQYTVKGKPSIHLKDENTGYIHYEDTNNNLEDYQTINKRFTTGTDLKGVYLILKSQNGDEAWGDKFTILEIKPAEDLLSPELINPNSWITTPGASISGNKLFINLGTNGTFRQSLSLNSYSTYSISFTASGPFNVTVRNSRGVLFERSNLMSSTSHISGTFKTESNNTGLYVELSRRSGGGGHISFENVSIK

SEQ ID NO: 569 - protein, 788 aa, Bacillus thuringiensis; identical to SEQ ID NO: 566

SEQ ID NO: 570 - protein, 787 aa, Bacillus thuringiensis
MNKNNTKLNARALPSFIDYFNGIYGFATGIKDIMNMIFKTDTGGNLTLDEILKNQQLLNEISGKLDGVNGSLNDLIAQGNLNTELSKEILKIANEQNQVLNDVNNKLNAINTMLHIYLPKITSMLNDVMKQNYALSLQIEYLSKQLQEISDKLDVINVNVLINSTLTEITPAYQRMKYVNEKFEDLTFATETTLKVKKNSSPADILDELTELTELAKSVTKNDVDGFEFYLNTFHDVMVGNNLFGRSALKTASELIAKENVKTSGSEVGNVYNFLIVLTALQAKAFLTLTTCRKLLGLADIDYTFIMNEHLDKEKEEFRVNILPTLSNTFSNPNYAKAKGSNEDAKIIVEAKPGYALVGFEMSNDSITVLKAYQAKLKQDYQVDKDSLSEIVYGDMDKLLCPDQSEQIYYTNNIAFPNEYVITKITFTKKMNSLRYEATANFYDSSTGDIDLNKTKVESSEAEYSTLSASTDGVYMPLGIISETFLTPINGFGIVVDENSKLVNLTCKSYLREVLLATDLSNKETKLIVPPIGFISNIVENGNLEGENLEPWKANNKNAYVDHTGGVNGTKALYVHKDGEFSQFIGDKLKSKTEYVIQYIVKGKASILLKDEKNGDCIYEDTNNGLEDFQTITKSFITGTDSSGVHLIFNSQNGDEAFGENFTISEIRLSEDLLSPELINSDAWVGSQGTWISGNSLTINSNVNGTFRQNLSLESYSTYSMNFNVNGFAKVTVRNSREVLFEKNYPQLSPKDISEKFTTAANNTGLYVELSRFTSGGAINFRNFSIK

SEQ ID NO: 571 - protein, 787 aa, Bacillus thuringiensis
MNKNNTKLSARALPSFIDYFNGIYGFATGIKDIMNMIFKTDTGGNLTLDEILKNQQLLNEISGKLDGVNGSLNDLIAQGNLNTELSKEILKIANEQNQVLNDVNNKLNAINTMLHIYLPKITSMLNDVMKQNYALSLQIEYLSKQLQEISDKLDVINVNVLINSTLTEITPAYQRMKYVNEKFEDLTFATETTLKVKKNSSPADILDELTELTELAKSVTKNDVDGFEFYLNTFHDVMVGNNLFGRSALKTASELIAKENVKTSGSEVGNVYNFLIVLTALQAKAFLTLTTCRKLLGLADIDYTFIMNEHLDKEKEEFRVNILPTLSNTFSNPNYAKAKGSNEDAKIIVEAKPGYALVGFEMSNDSITVLKAYQAKLKRDYQVDKDSLSEIVYGDMDKLLCPDQSEQIYYTNNIAFPNEYVITKITFTKKMNSLRYEATANFYDSSTGDIDLNKTKVESSEAEYSTLSASTDGVYTPLGIISETFLTPINGFGIVVDENSKLVNLTCKSYLREVLLATDLSNKETKLIVPPIGFISNIVENGNLEGENLEPWKANNKNAYVDHTGGVNGTKALYVHKDGEFSQFIGDKLKSKTEYVIQYIVKGKASILLKDEKNGDCIYEDTNNGLEDFQTITKSFITGTDSSGVHLIFNSQNGDEAFGENFTISEIRLSEDLLSPELINSDAWVGSQGTWISGNSLTINSNVNGTFRQNLSLESYSTYSMNFNVNGFAKVTVRNPREVLFEKNYPQLSPKDISEKFTTAANNTGLYVELSRFTSGGAINFRDFSIK

SEQ ID NO: 572 - protein, 840 aa, Bacillus thuringiensis
  misc_feature (58)..(58): Xaa can be any naturally occurring amino acid
MNMNNTKLNARALPSFIDYFNGIYGFATGIKDIMNMIFKTDTGGNLTLDEILKNQQLXNEISGKLDGVNGSLNDLIAQGNLNTELSKEILKIANEQNQVLNDVNNKLNAINTMLHIYLPKITSMLNDVMKQNYALSLQIEYLSKQLQEISDKLDVINVNVLINSTLTEITPAYQRMKYVNEKFEDLTFATETTLKVKKNSSPADILDELTELTELAKSVTKNDVDGFEFYLNTFHDVMVGNNLFGRSALKTASELIAKENVKTSGSEVGNVYNFLIVLTALQAKAFLTLTTCRKLLGLADIDYTFIMNEHLDKEKEEFRVNILPTLSNTFSNPNYAKAKGSNEDAKIIVEAKPGYALVGFEMSNDSITVLKAYQAKLKQDYQVDKDSLSEIVYGDMDKLLCPDQSEQIYYTNNIAFPNEYVITKITFTKKMNSLRYEATANFYDSSTGDIDLNKTKVESSEAEYSTLSASTDGVYMPLGIISETFLTPINGFGIVVDENSKLVNLTCKSYLREVLLATDLSNKETKLIVPPIGFISNIVENGNLEGENLEPWKANNKNAYVDHTGGVNGTKALYVHKDGEFSQFIGDKLKSKTEYVIQYIVKGKASILLKDEKNGDCIYEDTNNGLEDFQTITKSFITGTDSSGVHLIFNSQNGDEAFGENFTISEIRLSEDLLSPELINSDAWVGSQGTWISGNSLTINSNVNGTFRQNLSLESYSTYSMNFNVNGFAKVTVRNSREVLFEKNYPQLSPKDISEKFTTAANNTGLYVELSRFTSGGAINFRDFSIKLVDPNSVQARLQDVDGTIDTRSKLAAAQLYTRASQPELAPEDPEDLEHHHHHH

SEQ ID NO: 573 - protein, 787 aa, Bacillus thuringiensis; identical to SEQ ID NO: 570

SEQ ID NO: 574 - protein, 787 aa, Bacillus thuringiensis
MNKNNTKLSARALPSFIDYFNGIYGFATGIKDIMNMIFKTDTGGNLTLDEILKNQQLLNEISGKLDGVNGSLNDLIAQGNLNTELSKEILKIANEQNQVLNDVNNKLNAINTMLHIYLPKITSMLNDVMKQNYALSLQIEYLSKQLQEISDKLDVINVNVLINSTLTEITPAYQRMKYVNEKFEDLTFATETTLKVKKNSSPADILDELTELTELAKSVTKNDVDGFEFYLNTFHDVMVGNNLFGRSALKTASELIAKENVKTSGSEVGNVYNFLIVLTALQAKAFLTLTTCRKLLGLADIDYTFIMNEHLDKEKEEFRVNILPTLSNTFSNPNYAKAKGSNEDAKIIVEAKPGYALVGFEMSNDSITVLKAYQAKLKQDYQVDKDSLSEIVYGDMDKLLCPDQSEQIYYTNNIAFPNEYVITKITFTKKMNSLRYEATANFYDSSTGDIDLNKTKVESSEAEYSTLSASTDGVYMPLGIISETFLTPINGFGIVVDENSKLVNLTCKSYLREVLLATDLSNKETKLIVPPIGFISNIVENGNLEGENLEPWKANNKNAYVDHTGGVNGTKALYVHKDGEFSQFIGDKLKSKTEYVIQYIVKGKASILLKDEKNGDCIYEDTNNGLEDFQTITKSFITGTDSSGVHLIFNSQNGDEAFGENFTISEIRLSEDLLSPELINSDAWVGSQGTWISGNSLTINSNVNGTFRQNLSLESYSTYSMNFNVNGFAKVTVRNSREVLFEKNYPQLSPKDISEKFTTAANNTGLYVELSRFTSGGAINFRDFSIK

SEQ ID NO: 575 - protein, 803 aa, Bacillus thuringiensis; identical to SEQ ID NO: 484

SEQ ID NO: 576 - protein, 795 aa, Bacillus thuringiensis
MNKNNTKLSTRALPSFIDYFNGIYGFATGIKDIMNMIFKTDTGGDLTLDEILKNQQLLNEISGKLDGVNGSLNDLIAQGNLNTELSKEILKIANEQNQVLNDVNNKLDAINTMLHIYLPKITSMLSDVMKQNYALSLQIEYLSKQLQEISDKLDIINVNVLINSTLTEITPAYQRIKYVNEKFEELTFATETNLKVKKDGSPADILDELTELTELAKSVTKNDVDGFEFYLNTFHDVMVGNNLFGRSALKTASELITKENVKTSGSEVGNVYNFLIVLTALQAKAFLTLTTCRKLLGLADIDYTSIMNEHLNKEKEEFRVNILPTLSNTFSNPNYIKTKGSDEDAEVIIQAEPGHALVGFEMINDPSPALKVYQAKLKPNYQVDKQSLSETVYGDMDKILCPDKSQQMYYLHNITFPNEYVITEIIFTKKKNSLRYEVIANYYEFSSGDIDLNKKLVKSSEAEYSTLSVSNDAIYMPLGVISETFLTPIKGFGLTVDESSRLVTLTCKSYLREILLATDLSNKATKLIVPPNGFISNLVENGDIEADNIEPWKGNNKNAYVDHTGGVNGTKALYTQDDGEFSQFIGDKLKSKTEYIIQYTVKGNTSIYLKDKKNENVIYEDKNNNLEAFQTITKRFTTELDSSDVYLVFKCKNGYKAWGDNFLITEIRPKEVVSPELIKVENWIGMGGSNHVNPDSLLLFTGGRSILKQNLQLDSYSTYRVRFSLMVIGKAKVIIRNSSEVLFEKSYVNDSEGVLEGVSETFTTKSIQDNFYVELSNEGTFGSKDVAYFYNFSIK

SEQ ID NO: 577 - protein, 803 aa, Bacillus thuringiensis; identical to SEQ ID NO: 484

SEQ ID NO: 578 - protein, 803 aa, Bacillus thuringiensis
MNMNNTKLNARALPSFIDYFNGIYGFATGIKDIMNMIFKTDTGGGNLTLDEILKNQDLLNQISDKLDGINGDLGDLIAQGNLNSELTKELLKIANEQNLMLNNVNAQLNSINATLNTYLPKITSMLNEVMKQNYVLSLQIEFLSKQLQEISDKLDIINLNVLINSTLTEITPAYQRIKYVNDKFDELTSTVEKNPKINQDNFTEDVIDNLTDLTELARSVTRNDMDSFEFYIKTFHDVMIGNNLFSRSALKTASELIAKENIHTRGSEIGNVYTFMIVLTSLQAKAFLTLTTCRKLLGLADIDYTQIMNENLDREKEEFRLNILPTLSNDFSNPNYTETLGSDLVDPIVTLEAEPGYALIGFEILNDPLPVLKVYQAKLKPNYQVDKESIMENIYGNIHKLLCPKQREQKYYIKDMTFPEGYVITKIVFEKKLNLLGYEVTANLYDPFTGSIDLNKTILESWKEDCCEEDCCEEDCCEEDCCEELYKIIEADTNGVYMPLGVISETFLTPIYSFKLIIDEKTKKISLAGKSYLRESLLATDLVNKETNLIPSPNGFISSIVQNWHITSDNIEPWKANNKNAYVDKTDAMVGFSSLYTHKDGEFLQFIGAKLKAKTEYIIQYTVKGNPEVYLKNNKDICYEDKTNNFDTFQTITKKFNSGVDPSEIYLVFKNQIGYEAWGNNFIILEIKSLETLPQILKPENWIPLGNAEIKEDGKIEISGNGSMNQYIQLEQNSKYHLRFSVKGKGRVTMQAQTSHINVPATNEEVSIMIETTRLYGEGIISLLNDEVENSGVIFSDVSIVKE

SEQ ID NO: 579 - protein, 803 aa, Bacillus thuringiensis; identical to SEQ ID NO: 484

SEQ ID NO: 580 - protein, 801 aa, Bacillus thuringiensis
MNNTKLNARALPSFIDYFNGIYGFATGIKDIMNMIFKTDTGGGNLTLDEILKNQDLLNQISDKLDGINGDLGDLIAQGNLNSELTKELLKIANEQNLMLNNVNAQLNSINSTLNTYLPKITSMLSEVMKQNYVLSLQIEFLSEQLQEISDKLDVINLNVLINSTLTEITPAYQRIKYVNDKFDELTSTVEKNPKINQDNFTEDVIDNLTDLTELARSVTRNDMDSFEFYIKTFHDVMIGNNLFSRSALKTASELIAKENIHTMGSEIGNVYTFMVVLTSLQAKAFLTLTACRKLLGLTDIDYTQIMNENLNREKEEFRLNILPTLSNDFSNPNYTETLGSDLVDPIVTLEADPGYALIGFEILNDPLPVLKVYQAKLKPNYQVDKESIMENIYGNIHKLLCPKQRHQKYYIKDITFPEGYVITKIVFEKKLNLLGYEVTANLYDPFTGSIDLNKTILESWKEECCEEECCEEECCEEECCEELYKIIEADTNGVYMPLGVISETFLTPIYSFKLIIDERTKRISLAGKSYLRESLLATDLVNKDTNLIPSPNGFINSIVENWNITSDNIEPWKANNKNAYVDKTDDMVGFNSLYTHKDGEFLQFIGAKLKAKTEYIIQYTVKGSPEVYLKNNKGIFYEDTTNKFDTFQTITKKFNSGVDPSEIYLVFKNQIGYEAWGNKFIILEIKSFETLPQILKPENWMPFGNAEIKEDGKIEISGNGTMTQNIQLEQNSKYHLRFSVKGKGRVAIQTQSSHINVPATNEEVSTMITTRNLYGEGMIYLFNDDVENSKVIFSDVSLVKE

SEQ ID NO: 581 - protein, 700 aa, Bacillus thuringiensis
MNNTKLNARALPSFIDYFNGIYGFATGIKDIMNMIFKTDTGGGNLTLDEILKNQDLLNQISDKLDGINGDLGDLIAQGNLNSELTKELLKIANEQNLMLNNVNAQLNSINSTLNTYLPKITSMLSEVMKQNYVLSLQIEFLSEQLQEISDKLDVINLNVLINSTLTEITPAYQRIKYVNDKFDELTSTVEKNPKINQDNFTEDVIDNLTDLTELARSVTRNDMDSFEFYIKTFHDVMIGNNLFSRSALKTASELIAKENIHTMGSEIGNVYTFMVVLTSLQAKAFLTLTACRKLLGLTDIDYTQIMNENLNREKEEFRLNILPTLSNDFSNPNYTETLGSDLVDPIVTLEADPGYALIGFEILNDPLPVLKVYQAKLKPNYQVDKESIMENIYGNIHKLLCPKQRQQKYYIKDITFPEGYVITKIVFEKKLNLLGYEVTANLYDPFTGSIDLNKTILESWKEECCEEECCEEECCEEECCEELYKIIEADTNGVYMPLGVISETFLTPIYSFKLIIDERTKRISLAGKSYLRESLLATDLVNKDTNLIPSPNGFISSIVENWNITSDNIEPWKANNKNAYVDKTDDMVGFNSLYTHKDGEFLQFIGAKLKAKTEYIIQYTVKGSPEVYLKNNKGIFYEDTTNKFDTFQTITKKFNSGVDPSEIYLVFKNQIGYEAWGNKFIILEIKSFETLPQILKPENW

SEQ ID NO: 582 - protein, 490 aa, Bacillus thuringiensis
MNKNNTKLSARALPSFIDYFNGIYGFATGIKDIMNMIFKTDTGGGNLTLDEILKNQDLLNQISDKLDGINGDLGDLIAQGNLNSELIKELLKIANEQNLMLNNVNAQLNSINSTLNTYLPKITSMLSEVMKQNYVLSLQIEFLSEQLQEISDKLDVINLNVLINSTLTEITPAYQRIKYVNDKFDELTSTVEKNPKINQDNFTEDVIDNLTDLTELARSVTRNDMDSFEFYIKTFHDAMIGNNLFSRSALKTASELIAKENIHTMGSEIGNVYTFMVVLTSLQAKAFLTLTACRKLLGLTDIDYTQIMNENLNREKEEFRLNVLPTLSNDFSNPNYTETLGSDLVDPIVTLEADPGYALIGFEILNDPLPVLKVYQAKLKPNYQVDKESIMENIYGNIHKLLCPKQRQQKYYIKDITFPEGYVITKIVFEKKLNLLGYEVTANLYDPFTGSIDLNKTILESWKEECCEEECCEEECCEEECCEELYKIIE

SEQ ID NO: 583 - protein, 803 aa, Bacillus thuringiensis
MNKNNTKLNARALPSFIDYFNGIYGFATGIKDIMNMIFKTDTGGDLTLDEILKNQQLLNEISGKLDGVNGSLNDLIAQGNLNTELSKEILKIANEQNQVLNDVNNKLDAINTMLNIYLPKITSMLSDVMKQNYALSLQIEYLSRQLQEISDKLDVINLNVLINSTLTEITPSYQRIKYVNEKFDKLTFATESTLRAKQGIFNEDSFDNNTLENLTDLAELAKSITKNDVDSFEFYLHTFHDVLIGNNLFGRSALKTASELITKDEIKTSGSEIGKVYSFLIVLTSLQAKAFLTLTTCRKLLGLSDIDYTSIMNEHLNNEKNEFRDNILPALSNKFSNPSYAKTIGSDNYAKVILESEPGYALVGFEIINDPIPVLKAYKAKLKQNYQVDNQSLSEIVYLDIDKLFCPENSEQKYYTKNLTFPDGYVITKITFEKKLNNLIYEATANFYDPSTGDIDLNKKQVESTFPQTDYITMDIGDDDGIYMPLGVISETFLTPINSFGLEVDAKSKTLTLKCKSYLREYLLESDLKNKETGLIAPPNVFISNVVKNWDIEEDSLEPWVANNKNAYVDNTGGIERSKALFTQGDGEFSQFIGDKLKPNTDYIIQYTVKGKPAIYLKNKSTGYITYEDTNGNSEEFQTIAVKFTSETDLSQTHLVFKSQNGYEAWGDNFIILEAKLFETPESPELIKFNDWERFGTTYITGNELRIDHSRGGYFRQSLNIDSYSTYDLSFSFSGLWAKVIVKNSRGVVLFEKVKNNGSSYEDISESFTTASNKDGFFIELTAERTSSTFHSFRDISIKEKIE

SEQ ID NO: 584 - protein, 803 aa, Bacillus thuringiensis; identical to SEQ ID NO: 484

SEQ ID NO: 585 - protein, 803 aa, Bacillus thuringiensis
MNKNNTKLNARALPSFIDYFNGIYGFATGIKDIMNMIFKTDTGGDLTLDEILKNQQLLNEISGKLDGVNGSLNDLIAQGNLNTELSKEILKIANEQNQVLNDVNNKLDAINTMLNIYLPKITSMLSDVMKQNYALSLQIEYLSRQLQEISDKLDVINLNVLINSTLTEITPSYQRIKYVNEKFDKLTFATESTLRAKQGIFNEDSFDNNTLENLADLAELAKSITKNDVDSFEFYLHTFHDVLIGNNLFGRSALKTASELITKDEIKTSGSEIGKVYSFLIVLTSLQAKAFLTLTTCRKLLGLSDIDYTSIMNEHLNNEKNEFRDNILPALSNKFSNPSYAKTIGSDNYAKVILESEPGYALVGFEIINDPIPVLKAYKAKLKQNYQVDNQSLSEIVYLDIDKLFCPENSEQKYYTKNLTFPDGYVITKITFEKKLNNLIYEATANFYDPSTGDIDLNKKQVESTFPQTDYITMDIGDDDGIYMPLGVISETFLTPINSFGLEVDAKSKTLTLKCKSYLREYLLESDLKNKETGLIAPPNVFISNVVKNWDIEEDSLEPWVANNKNAYVDNTGGIERSKALFTQGDGEFSQFIGDKLKPNTDYIIQYTVKGKPAIYLKNKSTGYITYEDTNGNSEEFQTIAVKFTSETDLSQTHLVFKSQNGYEAWGDNFIILEAKLFETPESPELIKFNDWERFGTTYITGNELRIDHSRGGYFRQSLNIDSYSTYDLSFSFSGLWAKVIVKNSRGVVLFEKVKNNGSSYEDISESFTTASNKDGFFIELTAERTSSTFHSFRDISIKEKIE

SEQ ID NO: 586 - protein, 803 aa, Bacillus thuringiensis; identical to SEQ ID NO: 484

SEQ ID NO: 587 - protein, 803 aa, Bacillus thuringiensis; identical to SEQ ID NO: 585

SEQ ID NO: 588 - protein, 47 aa, Anemonia viridis; identical to SEQ ID NO: 386

SEQ ID NO: 589 - protein, 75 aa, Zea mays
QIFVKTLTGKTITLEVESSDTIDNVKAKIQDKEGIPPDQQRLIFAGKQLEDGRTLADYNIQKESTLHLVLRLRGG

SEQ ID NO: 590 - protein, 6 aa, Artificial Sequence
  ALKFLV
ALKFLV

SEQ ID NO: 591 - protein, 6 aa, Artificial Sequence
  Histidine tag
HHHHHH

SEQ ID NO: 592 - protein, 50 aa, Eratigena agrestis
EPDEICRARMTNKEFTYKSNVCNNCGDQVAACEAECFRNDVYTACHEAQK

SEQ ID NO: 593 - protein, 163 aa, Artificial Sequence
  Non-naturally occurring U1-agatoxin-Ta1b insecticidal protein
MGKMASLFATFLVVLVSLSLASESSAQIFVKTLTGKTITLEVESSDTIDNVKAKIQDKEGIPPDQQRLIFAGKQLEDGRTLADYNIQKESTLHLVLRLRGGALKFLVEPDEICRARMTNKEFTYKSNVCNNCGDQVAACEAECFRNDVYTACHEAQKHHHHHH

SEQ ID NO: 594 - protein, 37 aa, Hadronyche versuta; identical to SEQ ID NO: 262

SEQ ID NO: 595 - protein, 157 aa, Galanthus nivalis; identical to SEQ ID NO: 67

SEQ ID NO: 596 - protein, 316 aa, Sambucus nigra; identical to SEQ ID NO: 68

SEQ ID NO: 597 - protein, 287 aa, Maackia amurensis; identical to SEQ ID NO: 69

SEQ ID NO: 598 - protein, 239 aa, Erythrina cristagalli; identical to SEQ ID NO: 70

SEQ ID NO: 599 - protein, 540 aa, Ricinus communis; identical to SEQ ID NO: 71

SEQ ID NO: 600 - protein, 273 aa, Arachis hypogaea; identical to SEQ ID NO: 72

SEQ ID NO: 601 - protein, 212 aa, Triticum aestivum; identical to SEQ ID NO: 73

SEQ ID NO: 602 - protein, 290 aa, Canavalia ensiformis; identical to SEQ ID NO: 74

SEQ ID NO: 603 - protein, 144 aa, Ananas comosus; identical to SEQ ID NO: 75

SEQ ID NO: 604 - protein, 54 aa, Lathyrus hirsutus; identical to SEQ ID NO: 76

SEQ ID NO: 605 - protein, 281 aa, Canavalia bonariensis; identical to SEQ ID NO: 77

SEQ ID NO: 606 - protein, 237 aa, Canavalia grandiflora; identical to SEQ ID NO: 78

SEQ ID NO: 607 - protein, 237 aa, Cymbosema roseum; identical to SEQ ID NO: 79

SEQ ID NO: 608 - protein, 564 aa, Viscum album; identical to SEQ ID NO: 80

SEQ ID NO: 609 - protein, 250 aa, Homo sapiens [sequence omitted]

SEQ ID NO: 610 - protein, 234 aa, Cratylia mollis; identical to SEQ ID NO: 82

SEQ ID NO: 611 - protein, 569 aa, Viscum album; identical to SEQ ID NO: 83

SEQ ID NO: 612 - protein, 239 aa, Cymbosema roseum; identical to SEQ ID NO: 84

SEQ ID NO: 613 - protein, 135 aa, Homo sapiens; identical to SEQ ID NO: 85

SEQ ID NO: 614 - protein, 168 aa, Patiria pectinifera; identical to SEQ ID NO: 86

SEQ ID NO: 615 - protein, 233 aa, Vicia faba; identical to SEQ ID NO: 87

SEQ ID NO: 616 - protein, 1095 aa, Photorhabdus luminescens
MVTVMQNKISFLSVTSEQPLLDAGYQNVFNIVSISRAAFVQSVPTLPVQEAHAVYRQARQRAENLKSLYRAWQLRQEPVIKGLTKLNAQANVSVLQDTLVENIGGDGDFSDLMNRASQYADAASIQSLFSPGRYATALYKVAKDLHKSDSSLHIDNRRADLKDLILSETTMNKEVTSLDILLDVLQKGSKDITELSSAFFPMTLPYDDHLSQIDSALSAQARTLNGVWNTLTDTTAQAVSEQADKTNTLKFFAAQDDNQDTFFAGNTFYFKAVGFSGQPMVYLSQYTSGSGIVGAQLIAGNPDQAAAAIVAPLQLTWSMAKQCYYLGAPDGTKMGDGNVLTGCFLRGNSPTNPDQNGIFAQVANKSGSTQPLPSFHLPVTLERSEDKDKYYLKTEQGYIAVDSSGQSNWKNALVINGTKDNGLLLTFCSDSSGTPTNPDDVIPPAINDIPSPPARETLSLTPVSYQLITNPAPTTDDITNHYGLGSSGLQETASSASALTTALNSIETFCEKTRINFNQLMDLTAQQSYSQSSVDAKAASRYVRFGETAATRVNVYGAAYLNSTLAAAADGQYLWIQTDGKSLNFTDDTVVALAGRAEKLVRLSSQTGLSFEELDWLIVNASRSVPDHHDKIVLDKPVLEALAEYVSLKQRYGLDANTFVTFISAVNPYTPDQTPSFYETAFRSADGNHVIALGTAVKYAENEQDELSTICCKALGVTSDEFFRIGRYCFGNAGSFTLDEYTASQLYRFGAIPRLFGLTFAQAEILWRLMEGGKDILLQQLGQAKSLQPLAILRRTEQVLDWMSSVNLSLTYLQGMVSTQWSGTATAEMFNFLKNVCDSVNSQSVTKETMDPALQQKVLRALSAGFGIKSNVMGIVTVWLEKITANDDSPFTLVNYWNAIQTLFSRNYVTLDDLQADTALVIATQRLSQLVLIVKWLSLTEQDLQLLTTHPEHLMNNITGVPVPNPELLLTLSRFKQWQTQVTVSRDEAMRCFDQLNAEGMTADSAASLIATLHEMDKGTVAQVNTLLLGENNWPKSFTSLWQLLTWLRVGQSLNVGSTTLGNLLAMMQADPAAESSALLASVAQNLSAAISNHQ

SEQ ID NO: 617 - protein, 1189 aa, Photorhabdus luminescens
MSESLFTQTLKEARRDALVAHYIATQVPADLKESIQTADDLYEYLLLDTKISDLVTTSPLSEAIGSLQLFIHRAIEGYDGTLADSAKPYFADEQFLYNWDSFNHRYSTWAGKERLKFYAGDYIDPTLRLNKTEIFTAFEQGISQGKLKSELVESKLRDYLISYDTLVTLDYITACQGKDNKTIFFIGRTQNAPYAFYWRKLTLVTDGGKLKPDQWSEWRAINAGISEAYAGHVEPFWENNKLHIRWFTISKEDKIDFVYKNIWVMSSDYSWTSKKKILELSFTGYNRVGATGSSSPTEVSSQYGSDAQMNISDDGTVLIFQNAGGATPRTGVTLCYDSGEVIKNLSNTGSANLSSKNYATTKLRMCHGQSYNNNNYCNFTLSINTIEFTSYGTFSSDGKQFTPPSGSAIDLHLPNYVDLNALLDISLDSLLNYDVQGQFGGSNPVDNFSGPYGIYLWEIFFHIPFLIAVRMQTEQRYEDADTWYKYIFRSAGYRDANGELIMDGSKPRYWNVMPLELDTAWDTTQPATTDPDVIAMADPMHYKLAIFLHTLDLLIARGDSAYRQLERDTLVEAKMYYIQAQQLLGPRPDIHTTNTWPNPTLSVEAGKIATPTLLNSPEVMTFAAWLNAGDTANIGDGDFLPPYNDVLLGYWDKLELRLYNLRHNLSLDGQPLNLPLYATPVDPKTLQRQQAGGDGTGSSPAGGQGSVQGWRYPLLVERARTAVSLLTQFGNSLQTTLERQDNEKMTLLLQTQQQAILKQQNDIQQNNLKGLQHSLTALQASRDGASLRQKHYSDLINGGLSAAEIAGLTLRSTAMITNGIATGLLIAGGIANAVPNVFGLANGGSEWGAPLIGSGQATQVGAGIQDQSAGISEVTAGYQRRQEEWTLQRDVADNEITQLDAQIQSLQEQITMAQKQITLSETEQANAQAIYDLQTTRFTGQALYNWMAGRLSALYYQMYDSTLPICLQAKAALVQELGEKDSDSLFQVPVWNDLWQGLLAGEGLSSELQKLDAIWLARGGIGLEAIRTVSLDTLFGTGTLSQNINKVLNGETVSPSGGVTLTLTGDIFQATLDLSQLGLENSYNLGNEKKRRIKRIAVTLPTLLGPYQDLEATLVMGAEIATLSHGVNDGGRFVTDFNDSRFLPFEGRDATTGTLALNIFHAGKEGSQHDLAANLSDIIVHLNYIIRDA

SEQ ID NO: 618 - protein, 1485 aa, Photorhabdus luminescens
MQDSPEVSITTLSLPKGGGAINGMGEALNAAGPDGMASLSLPLPLSTGRGTAPGLSLIYSNSAGNGPFGIGWQCGVMSISRRTQHGIPQYGNDDTFLSPQGEVMNIALNDQGQPDIRQDVKTLQGVTLPISYTVTRYQARQILDFSKIEYWQPASGQEGRAFWLISSPDGQLHILGKTAQACLANPQNDQQIAQWLLEETVTPAGEHVSYQYRAEDEAHCDDNEKTAHPNVTAQRYLVQVNYGNIKPQASLFVLDNAPPAPEEWLFHLVFDHGERDTSLHTVPTWDAGTAQWSVRPDIFSRYEYGFEVRTRRLCQQVLMFHRTALMAGEASTNDAPELVGRLILEYDKNASVTTLITIRQLSHESDGSPVTQPPLELAWQRFDLEKMPTWQRFDALDNFNSQQRYQLVDLRGEGLPGMLYQDRGAWWYKAPQRQEDGDSNAVTYDKIAPLPTLPNLQDNASLMDINGDGQLDWVVTASGIRGYHSQQPDGKWTHFTPINALPVEYFHPSIQFADLTGAGLSDLVLIGPKSVRLYANQRNGWRKGEDVPQSTGITLPVTGTDARKLVAFSDMLGSGQQHLVEIKANRVTCWPNLGHGRFGQPLTLSGFSQPENSFNPERLFLADIDGSGTTDLIYAQSGSLLIYLNQSGNQFDAPLTLALPEGVQFDNTCQLQVADIQGLGIASLILTVPHIAPHHWRCDLSLTKPWLLNVMNNNRGAHHTLHYRSSAQFWLDEKLQLTKAGKSPACYLPFPMHLLWYTEIQDEISGNRLTSEVNYSHGVWDGKEREFRGFGCIKQTDTTTFSHGTAPEQAAPSLSISWFATGMDEVDSQLATEYWQADTQAYSGFETRYTVWDHTNQTDQAFTPNETQRNWLTRALKGQLLRTELYGLDGTDKQTVPYTVSESRYQVRSIPVNKETELSAWVTAIENRSYHYERIITDPQFSQSIKLQHDIFGQSLQSVDIAWPRREKPAVNPYPPTLPETLFDSSYDDQQQLLRLVRQKNSWHHLTDGENWRLGLPNAQRRDVYTYDRSKIPTEGISLEILLKDDGLLADEKAAVYLGQQQTFYTAGQAEVTLEKPTLQALVAFQETAMMDDTSLQAYEGVIEEQELNTALTQAGYQQVARLFNTRSESPVWAARQGYTDYGDAAQFWRPQAQRNSLLTGKTTLTWDTHHCVIIQTQDAAGLTTQAHYDYRFLTPVQLTDINDNQHIVTLDALGRVTTSRFWGTEAGQAAGYSNQPFTPPDSVDKALALTGALPVAQCLVYAVDSWMPSLSLSQLSQSQEEAEALWAQLRAAHMITEDGKVCALSGKRGTSHQNLTIQLISLLASIPRLPPHVLGITTDRYDSDPQQQHQQTVSFSDGFGRLLQSSARHESGDAWQRKEDGGLVVDANGVLVSAPTDTRWAVSGRTEYDDKGQPVRTYQPYFLNDWRYVSDDSARDDLFADTHLYDPLGREYKVITAKKYLREKLYTPWFIVSEDENDTASRTP

SEQ ID NO: 619 - protein, 532 aa, Photorhabdus luminescens
MSKYKLNRYLLAISVLYAFISGNVIAANPKISAYYLSGPAAQVDTQEYYASLDNFKKLSRDISKNKSNFNTLVLSFVQPGFVNYEKNSLKCSGLFGYTCISGQSVSTQEAENARADFVALKGVIADLKSHGVSTYIAVGGWNFSCYPKIYDVTAGKKDACGNEPGAVYDIFPNPLTKIPRFDSTITGKEADKAYRNIVNLAADLKVEGIDVDYEEFWHADINAKSWKLTPDSINVPPNNSETLITSTLIAKGLGGYVYDASMKIVPGAEKIPRAMPVTVDKFAAILKSFYTSINAVKPSLKLSTAGPATGGIPNMSANWGTNARNSDIYGGAWWGGNLYGLIYNTALSYPDLINRLSYIGVMTYDLSEKDCGFIGGGETYIPCDLPGQVKYYYGQYINWLKSGNEVVTFHVKLKGARNYAQASVQPQKLLVLPPITVGFEVGKPATGNLPLTKTALNSILDGTIKYGKTGLIMWDLFKNERYDGNNWKDEWATPNDLLSTACKKIGLTGEHYNCDSSVPTPAPVSAFTKKEH

SEQ ID NO: 620 - protein, 424 aa, Trichoderma viride
MLGFLGKSMALLAALQATLTSATPVSTNDVSVEKRASGYTNAVYFTNWGIYGRNFQPQDLVASDITHVIYPFMNFQADGTVVSGDAYADYQKHYSDDSWNDVGNNAYGCVNQLFKLKKANRNLKVMLSIGGWTWSTNFPSAASTDANRKNFAKTAITFMKDWGFDGIDVDWEYPADDTQATNMVLLLKEIRSQLDAYAAQYAPGYHFLLSIAAPAGPEHYSALHMADLGQVLDYVNLMAYDYAGSWSSYSGHDANLFANPSNPNSSPYNTDQAIKAYINGGVPASKIVLGMPIYGRSFESTNGIGQTYNGIGSGSWENGIWDYKVLPKAGATVQYDSVAQAYYSYDSSSKELISFDTPDMVSKKVSYLKNLGLGGSMFWEASADKTGSDSLIGTSHRALGSLDSTQNLLSYPNSQYDNIRSGLN

SEQ ID NO: 621 - protein, 51 aa, Artificial sequence
  TVP-R9A
EPDEICRAAMTNKEFTYKSNVCNNCGDQVAACEAECFRNDVYTACHEAQKG

SEQ ID NO: 622 - protein, 51 aa, Artificial sequence
  TVP-R9G
EPDEICRAGMTNKEFTYKSNVCNNCGDQVAACEAECFRNDVYTACHEAQKG

SEQ ID NO: 623 - protein, 51 aa, Artificial sequence; identical to SEQ ID NO: 12
  TVP-R9N

SEQ ID NO: 624 - protein, 51 aa, Artificial sequence
  TVP-R9L
EPDEICRALMTNKEFTYKSNVCNNCGDQVAACEAECFRNDVYTACHEAQKG

SEQ ID NO: 625 - protein, 51 aa, Artificial sequence
  TVP-R9D
EPDEICRADMTNKEFTYKSNVCNNCGDQVAACEAECFRNDVYTACHEAQKG

SEQ ID NO: 626 - protein, 51 aa, Artificial sequence
  TVP-R9V
EPDEICRAVMTNKEFTYKSNVCNNCGDQVAACEAECFRNDVYTACHEAQKG

SEQ ID NO: 627 - protein, 51 aa, Artificial sequence
  TVP-R9M
EPDEICRAMMTNKEFTYKSNVCNNCGDQVAACEAECFRNDVYTACHEAQKG

SEQ ID NO: 628 - protein, 51 aa, Artificial sequence
  TVP-R9I
EPDEICRAIMTNKEFTYKSNVCNNCGDQVAACEAECFRNDVYTACHEAQKG

SEQ ID NO: 629 - protein, 51 aa, Artificial sequence; identical to SEQ ID NO: 51
  TVP-R9Q/ T43A

SEQ ID NO: 630 - protein, 51 aa, Artificial sequence; identical to SEQ ID NO: 2
  TVP-R9Q

SEQ ID NO: 631 - protein, 51 aa, Artificial sequence
  TVP-R9C
EPDEICRACMTNKEFTYKSNVCNNCGDQVAACEAECFRNDVYTACHEAQKG

SEQ ID NO: 632 - protein, 51 aa, Artificial sequence
  TVP-R9E
EPDEICRAEMTNKEFTYKSNVCNNCGDQVAACEAECFRNDVYTACHEAQKG

SEQ ID NO: 633 - protein, 51 aa, Artificial sequence
  TVP-R9T
EPDEICRATMTNKEFTYKSNVCNNCGDQVAACEAECFRNDVYTACHEAQKG

SEQ ID NO: 634 - protein, 51 aa, Artificial sequence
  TVP-R9S
EPDEICRASMTNKEFTYKSNVCNNCGDQVAACEAECFRNDVYTACHEAQKG

SEQ ID NO: 635 - protein, 51 aa, Artificial sequence
  TVP-T43F
EPDEICRARMTNKEFTYKSNVCNNCGDQVAACEAECFRNDVYFACHEAQKG

SEQ ID NO: 636 - protein, 51 aa, Artificial sequence
  TVP-T43P
EPDEICRARMTNKEFTYKSNVCNNCGDQVAACEAECFRNDVYPACHEAQKG

SEQ ID NO: 637 - protein, 51 aa, Artificial sequence
  TVP-T43Y
EPDEICRARMTNKEFTYKSNVCNNCGDQVAACEAECFRNDVYYACHEAQKG

SEQ ID NO: 638 - protein, 51 aa, Artificial sequence
  TVP-T43K
EPDEICRARMTNKEFTYKSNVCNNCGDQVAACEAECFRNDVYKACHEAQKG

SEQ ID NO: 639 - protein, 51 aa, Artificial sequence
  TVP-T43W
EPDEICRARMTNKEFTYKSNVCNNCGDQVAACEAECFRNDVYWACHEAQKG

SEQ ID NO: 640 - protein, 51 aa, Artificial sequence
  TVP-T43H
EPDEICRARMTNKEFTYKSNVCNNCGDQVAACEAECFRNDVYHACHEAQKG

SEQ ID NO: 641 - protein, 51 aa, Artificial sequence; identical to SEQ ID NO: 49
  TVP-T43A

SEQ ID NO: 642 - protein, 51 aa, Artificial sequence
  TVP-T43G
EPDEICRARMTNKEFTYKSNVCNNCGDQVAACEAECFRNDVYGACHEAQKG

SEQ ID NO: 643 - protein, 51 aa, Artificial sequence
  TVP-T43N
EPDEICRARMTNKEFTYKSNVCNNCGDQVAACEAECFRNDVYNACHEAQKG

SEQ ID NO: 644 - protein, 51 aa, Artificial sequence
  TVP-T43L
EPDEICRARMTNKEFTYKSNVCNNCGDQVAACEAECFRNDVYLACHEAQKG

SEQ ID NO: 645 - protein, 51 aa, Artificial sequence
  TVP-T43D
EPDEICRARMTNKEFTYKSNVCNNCGDQVAACEAECFRNDVYDACHEAQKG

SEQ ID NO: 646 - protein, 51 aa, Artificial sequence
  TVP-T43V
EPDEICRARMTNKEFTYKSNVCNNCGDQVAACEAECFRNDVYVACHEAQKG

SEQ ID NO: 647 - protein, 51 aa, Artificial sequence
  TVP-T43M
EPDEICRARMTNKEFTYKSNVCNNCGDQVAACEAECFRNDVYMACHEAQKG

SEQ ID NO: 648 - protein, 51 aa, Artificial sequence
  TVP-T43I
EPDEICRARMTNKEFTYKSNVCNNCGDQVAACEAECFRNDVYIACHEAQKG

SEQ ID NO: 649 - protein, 51 aa, Artificial sequence
  TVP-T43Q
EPDEICRARMTNKEFTYKSNVCNNCGDQVAACEAECFRNDVYQACHEAQKG

SEQ ID NO: 650 - protein, 51 aa, Artificial sequence
  TVP-T43C
EPDEICRARMTNKEFTYKSNVCNNCGDQVAACEAECFRNDVYCACHEAQKG

SEQ ID NO: 651 - protein, 51 aa, Artificial sequence
  TVP-T43E
EPDEICRARMTNKEFTYKSNVCNNCGDQVAACEAECFRNDVYEACHEAQKG

SEQ ID NO: 652 - protein, 51 aa, Artificial sequence; identical to SEQ ID NO: 1
  TVP-T43T

SEQ ID NO: 653 - protein, 51 aa, Artificial sequence
  TVP-T43S
EPDEICRARMTNKEFTYKSNVCNNCGDQVAACEAECFRNDVYSACHEAQKG

SEQ ID NO: 654 - protein, 51 aa, Artificial sequence
  TVP-T43R
EPDEICRARMTNKEFTYKSNVCNNCGDQVAACEAECFRNDVYRACHEAQKG

SEQ ID NO: 655 - DNA, 153 bp, Artificial sequence
  TVP-R9A
gaaccagacgagatatgcagagcagcaatgaccaacaaagaatttacctataagtccaacgtatgcaataattgtggcgaccaggtggcagcctgcgaggcagagtgctttcgtaatgacgtttacacagcttgtcacgaggctcagaaaggt

SEQ ID NO: 656 - DNA, 153 bp, Artificial sequence
  TVP-R9G
gaaccagacgagatatgcagagcaggaatgaccaacaaagaatttacctataagtccaacgtatgcaataattgtggcgaccaggtggcagcctgcgaggcagagtgctttcgtaatgacgtttacacagcttgtcacgaggctcagaaaggt

SEQ ID NO: 657 - DNA, 153 bp, Artificial sequence
  TVP-R9N
gaaccagacgagatatgcagagcaaatatgaccaacaaagaatttacctataagtccaacgtatgcaataattgtggcgaccaggtggcagcctgcgaggcagagtgctttcgtaatgacgtttacacagcttgtcacgaggctcagaaaggt

SEQ ID NO: 658 - DNA, 153 bp, Artificial sequence
  TVP-R9L
gaaccagacgagatatgcagagcactaatgaccaacaaagaatttacctataagtccaacgtatgcaataattgtggcgaccaggtggcagcctgcgaggcagagtgctttcgtaatgacgtttacacagcttgtcacgaggctcagaaaggt

SEQ ID NO: 659 - DNA, 153 bp, Artificial sequence
  TVP-R9D
gaaccagacgagatatgcagagcagatatgaccaacaaagaatttacctataagtccaacgtatgcaataattgtggcgaccaggtggcagcctgcgaggcagagtgctttcgtaatgacgtttacacagcttgtcacgaggctcagaaaggt

SEQ ID NO: 660 - DNA, 153 bp, Artificial sequence
  TVP-R9V
gaaccagacgagatatgcagagcagtcatgaccaacaaagaatttacctataagtccaacgtatgcaataattgtggcgaccaggtggcagcctgcgaggcagagtgctttcgtaatgacgtttacacagcttgtcacgaggctcagaaaggt

SEQ ID NO: 661 - DNA, 153 bp, Artificial sequence
  TVP-R9M
gaaccagacgagatatgcagagcaatgatgaccaacaaagaatttacctataagtccaacgtatgcaataattgtggcgaccaggtggcagcctgcgaggcagagtgctttcgtaatgacgtttacacagcttgtcacgaggctcagaaaggt

SEQ ID NO: 662 - DNA, 153 bp, Artificial sequence
  TVP-R9I
gaaccagacgagatatgcagagcaattatgaccaacaaagaatttacctataagtccaacgtatgcaataattgtggcgaccaggtggcagcctgcgaggcagagtgctttcgtaatgacgtttacacagcttgtcacgaggctcagaaaggt

SEQ ID NO: 663 - DNA, 153 bp, Artificial sequence
  TVP-R9Q/ T43A
gaaccagacgagatatgcagagcacaaatgaccaacaaagaatttacctataagtccaacgtatgcaataattgtggcgaccaggtggcagcctgcgaggcagagtgctttcgtaatgacgtttacgcagcttgtcacgaggctcagaaaggt

SEQ ID NO: 664 - DNA, 153 bp, Artificial sequence; identical to SEQ ID NO: 17
  TVP-R9Q

SEQ ID NO: 665 - DNA, 153 bp, Artificial sequence
  TVP-R9C
gaaccagacgagatatgcagagcatctatgaccaacaaagaatttacctataagtccaacgtatgcaataattgtggcgaccaggtggcagcctgcgaggcagagtgctttcgtaatgacgtttacacagcttgtcacgaggctcagaaaggt

SEQ ID NO: 666 - DNA, 153 bp, Artificial sequence
  TVP-R9E
gaaccagacgagatatgcagagcagaaatgaccaacaaagaatttacctataagtccaacgtatgcaataattgtggcgaccaggtggcagcctgcgaggcagagtgctttcgtaatgacgtttacacagcttgtcacgaggctcagaaaggt

SEQ ID NO: 667 - DNA, 153 bp, Artificial sequence
  TVP-R9T
gaaccagacgagatatgcagagcaactatgaccaacaaagaatttacctataagtccaacgtatgcaataattgtggcgaccaggtggcagcctgcgaggcagagtgctttcgtaatgacgtttacacagcttgtcacgaggctcagaaaggt

SEQ ID NO: 668 - DNA, 153 bp, Artificial sequence; identical to SEQ ID NO: 665
  TVP-R9S

SEQ ID NO: 669 - DNA, 153 bp, Artificial sequence
  TVP-T43F
gaaccagacgagatatgcagagcaaggatgaccaacaaagaatttacctataagtccaacgtatgcaataattgtggcgaccaggtggcagcctgcgaggcagagtgctttcgtaatgacgtttactttgcttgtcacgaggctcagaaaggt

SEQ ID NO: 670 - DNA, 153 bp, Artificial sequence
  TVP-T43P
gaaccagacgagatatgcagagcaaggatgaccaacaaagaatttacctataagtccaacgtatgcaataattgtggcgaccaggtggcagcctgcgaggcagagtgctttcgtaatgacgtttaccctgcttgtcacgaggctcagaaaggt

SEQ ID NO: 671 - DNA, 153 bp, Artificial sequence
  TVP-T43Y
gaaccagacgagatatgcagagcaaggatgaccaacaaagaatttacctataagtccaacgtatgcaataattgtggcgaccaggtggcagcctgcgaggcagagtgctttcgtaatgacgtttactatgcttgtcacgaggctcagaaaggt

SEQ ID NO: 672 - DNA, 153 bp, Artificial sequence
  TVP-T43K
gaaccagacgagatatgcagagcaaggatgaccaacaaagaatttacctataagtccaacgtatgcaataattgtggcgaccaggtggcagcctgcgaggcagagtgctttcgtaatgacgtttacaaagcttgtcacgaggctcagaaaggt

SEQ ID NO: 673 - DNA, 153 bp, Artificial sequence
  TVP-T43W
gaaccagacgagatatgcagagcaaggatgaccaacaaagaatttacctataagtccaacgtatgcaataattgtggcgaccaggtggcagcctgcgaggcagagtgctttcgtaatgacgtttactgggcttgtcacgaggctcagaaaggt

SEQ ID NO: 674 - DNA, 153 bp, Artificial sequence
  TVP-T43H
gaaccagacgagatatgcagagcaaggatgaccaacaaagaatttacctataagtccaacgtatgcaataattgtggcgaccaggtggcagcctgcgaggcagagtgctttcgtaatgacgtttaccatgcttgtcacgaggctcagaaaggt

SEQ ID NO: 675 - DNA, 153 bp, Artificial sequence; identical to SEQ ID NO: 54
  TVP-T43A

SEQ ID NO: 676 - DNA, 153 bp, Artificial sequence
  TVP-T43G
gaaccagacgagatatgcagagcaaggatgaccaacaaagaatttacctataagtccaacgtatgcaataattgtggcgaccaggtggcagcctgcgaggcagagtgctttcgtaatgacgtttacggtgcttgtcacgaggctcagaaaggt

SEQ ID NO: 677 - DNA, 153 bp, Artificial sequence
  TVP-T43N
gaaccagacgagatatgcagagcaaggatgaccaacaaagaatttacctataagtccaacgtatgcaataattgtggcgaccaggtggcagcctgcgaggcagagtgctttcgtaatgacgtttacaatgcttgtcacgaggctcagaaaggt

SEQ ID NO: 678 - DNA, 153 bp, Artificial sequence
  TVP-T43L
gaaccagacgagatatgcagagcaaggatgaccaacaaagaatttacctataagtccaacgtatgcaataattgtggcgaccaggtggcagcctgcgaggcagagtgctttcgtaatgacgtttacttagcttgtcacgaggctcagaaaggt

SEQ ID NO: 679 - DNA, 153 bp, Artificial sequence
  TVP-T43D
gaaccagacgagatatgcagagcaaggatgaccaacaaagaatttacctataagtccaacgtatgcaataattgtggcgaccaggtggcagcctgcgaggcagagtgctttcgtaatgacgtttacgatgcttgtcacgaggctcagaaaggt

SEQ ID NO: 680 - DNA, 153 bp, Artificial sequence
  TVP-T43V
gaaccagacgagatatgcagagcaaggatgaccaacaaagaatttacctataagtccaacgtatgcaataattgtggcgaccaggtggcagcctgcgaggcagagtgctttcgtaatgacgtttacgtcgcttgtcacgaggctcagaaaggt

SEQ ID NO: 681 - DNA, 153 bp, Artificial sequence
  TVP-T43M
gaaccagacgagatatgcagagcaaggatgaccaacaaagaatttacctataagtccaacgtatgcaataattgtggcgaccaggtggcagcctgcgaggcagagtgctttcgtaatgacgtttacatggcttgtcacgaggctcagaaaggt

SEQ ID NO: 682 - DNA, 153 bp, Artificial sequence
  TVP-T43I
gaaccagacgagatatgcagagcaaggatgaccaacaaagaatttacctataagtccaacgtatgcaataattgtggcgaccaggtggcagcctgcgaggcagagtgctttcgtaatgacgtttacattgcttgtcacgaggctcagaaaggt

SEQ ID NO: 683 - DNA, 153 bp, Artificial sequence
  TVP-T43Q
gaaccagacgagatatgcagagcaaggatgaccaacaaagaatttacctataagtccaacgtatgcaataattgtggcgaccaggtggcagcctgcgaggcagagtgctttcgtaatgacgtttaccaagcttgtcacgaggctcagaaaggt

SEQ ID NO: 684 - DNA, 153 bp, Artificial sequence
  TVP-T43C
gaaccagacgagatatgcagagcaaggatgaccaacaaagaatttacctataagtccaacgtatgcaataattgtggcgaccaggtggcagcctgcgaggcagagtgctttcgtaatgacgtttactctgcttgtcacgaggctcagaaaggt

SEQ ID NO: 685 - DNA, 153 bp, Artificial sequence
  TVP-T43E
gaaccagacgagatatgcagagcaaggatgaccaacaaagaatttacctataagtccaacgtatgcaataattgtggcgaccaggtggcagcctgcgaggcagagtgctttcgtaatgacgtttacgaagcttgtcacgaggctcagaaaggt

SEQ ID NO: 686 - DNA, 153 bp, Artificial sequence; identical to SEQ ID NO: 16
  TVP-T43T

SEQ ID NO: 687 - DNA, 153 bp, Artificial sequence
  TVP-T43S
gaaccagacgagatatgcagagcaaggatgaccaacaaagaatttacctataagtccaacgtatgcaataattgtggcgaccaggtggcagcctgcgaggcagagtgctttcgtaatgacgtttactcagcttgtcacgaggctcagaaaggt

SEQ ID NO: 688 - DNA, 153 bp, Artificial sequence
  TVP-T43R
gaaccagacgagatatgcagagcaaggatgaccaacaaagaatttacctataagtccaacgtatgcaataattgtggcgaccaggtggcagcctgcgaggcagagtgctttcgtaatgacgtttacagagcttgtcacgaggctcagaaaggt

SEQ ID NO: 689 - protein, 81 aa, Phoneutria nigriventer; identical to SEQ ID NO: 239
